(19) United States
(12) Patent Application Publication
(10) Pub. No.: US 2006/0159708 A1
(43) Pub. Date: Jul. 20, 2006

(54) Diphtheria toxin variant

(76) Inventors: Robert J. Harrison, Medfield, MA (US); Johanna C. Vanderspek, Worcester, MA (US)

Correspondence Address: LISA A. HAILE, J.D., Ph.D.;DLA PIPER RUDNICK GRAY CARY US LLP., Suite 1100, 4365 Executive Drive, San Diego, CA, 92121-2133, US

(21) Appl. No.: 10/995,338

(22) Filed: Nov. 24, 2004

Related U.S. Application Data
(60) Provisional application No. 60/524,615, filed on Nov. 25, 2003.

(51) Int. Cl. A61K 39/05; C07K 14/24

(52) U.S. Cl. 424/245.1; 530/350

(57) ABSTRACT

The present invention relates to methods and compositions of modified variants of diphtheria toxin (DT) that reduce binding to vascular endothelium or vascular endothelial cells, and therefore, reduce the incidence of Vascular Leak Syndrome. One aspect of the present invention relates to a polypeptide toxophore from a modified DT, wherein the mutation is the substitution or deletion at least one amino acid residue at the amino acid residues 6-8, 28-30 or 289-291 of native DT. Another aspect of the present invention relates to a fusion protein which comprises a modified DT and a non-DT fragment. Another aspect of the present invention relates to the use of modified DT for the treatment of cancer.

[0001] This application claims priority from U.S. Provisional Application Ser. No. 60/524,615, filed Nov. 25, 2003. The entirety of that provisional application is incorporated herein by reference.

### FIELD OF THE INVENTION

[0002] The present invention is directed to methods and compositions of modified variants of diphtheria toxin (hereinafter “DT) that reduce binding to vascular endothelium or vascular endothelial cells, therefore, reduce the incidence of Vascular Leak Syndrome (hereinafter “VLS”).

### BACKGROUND OF THE INVENTION

[0003] Vascular Leak Syndrome is primarily observed in patients receiving protein fusion toxin or recombinant cytokine therapy. VLS can manifest as hypoalbuminemia, weight gain, pulmonary edema and hypotension. In some patients receiving immunotoxins and fusion toxins, myalgia and rhabdomyolysis result from VLS as a function of fluid accumulation in the muscle tissue or the cerebral microvasculature [Smallshaw et al., Nat Biotechnol. 21(4):387-91 (2003)]. VLS has occurred in patients treated with immunotoxins containing ricin A chain, saporin, pseudomonas exotoxin A and DT. All of the clinical testing on the utility of targeted toxins, immunotoxins and recombinant cytokines reported that VLS and VLS-like effects were observed in the treatment population. VLS occurred in approximately 30% of patients treated with DAB₃₈₉IL-2 [(Foss et al., Clin Lymphoma 1(4):298-302 (2001), Figgitt et al., Am J Clin Dermatol., 1(1):67-72 (2000)]. DAB₃₈₉IL-2, is interchangeable referred to in this application as DT387-IL2, is a protein fusion toxin comprised of the catalytic (C) and transmembrane (T) domains of DT (the DT toxophore), genetically fused to interleukin 2 (IL-2) as a targeting ligand. [Williams et al., Protein Eng., 1:493-498 (1987); Williams et al., J. Biol. Chem., 265:11885-11889 (1990); Williams et al., J. Biol. Chem., 265 (33):20673-20677, Waters et al., Ann. New York Acad. Sci., 30(636):403-405, (1991); Kiyokawa et al., Protein Engineering, 4(4):463-468 (1991); Murphy et al., In Handbook of Experimental Pharmacology, 145:91-104 (2000)]. VLS has also been observed following the administration of IL-2, growth factors, monoclonal antibodies and traditional chemotherapy. Severe VLS can cause fluid and protein extravasation, edema, decreased tissue perfusion, cessation of therapy and organ failure. [Vitetta et al., Immunology Today, 14:252-259 (1993); Siegall et al., Proc. Natl. Acad. Sci., 91(20):9514-9518 (1994); Baluna et al., Int. J. Immunopharmacology, 18(6-7):355-361 (1996); Baluna et al., Immunopharmacology, 37(2-3):117-132 (1997); Bascon, Immunopharmacology, 39(3):255 (1998)].

[0004] Reduction or elimination of VLS as a side effect would represent a significant advancement as it would improve the “risk benefit ratio” of protein therapeutics, and in particular, the immunotoxin and fusion toxin subclasses of protein therapeutics. (Baluna et al., Int. J. Immunopharmacology, 18(6-7):355-361 (1996); Baluna et al., Immunopharmacology, 37(No. 2-3):117-132 (1997); Bascon, Immunopharmacology, 39(3): 255 (1998). The ability to develop fusion proteins, single chain molecules comprised of a cytotoxin and unique targeting domain (scfv antibodies in the case of immunotoxins) could facilitate the development of the therapeutic agents for autoimmune diseases, such as rheumatoid arthritis and psoriasis transplant rejection and other non-malignant medical indications. (Chaudhary et al., Proc. Natl. Acad. Sci. USA, 87(23):9491-9494 (1990); Frankel et al., In Clinical Applications of Immunotoxins Scientific Publishing Services, Charleston S.C., (1997), Knechtle et al., Transplantation, 15(63):1-6 (1997); Knechtle et al., Surgery, 124(2): 438-446 (1998); LeMaistre, Clin. Lymphoma, 1:S37-40 (2000); Martin et al., J. Am. Acad. Dermatol., 45(6):871-881, 2001)). DAB₃₈₉IL-2 (ONTAK) is currently the only FDA approved protein fusion toxin and employs a DT toxophore and the cytokine interleukin 2 (IL-2) to target IL-2 receptor bearing cells and is approved for the treatment of cutaneous T-cell lymphoma (CTCL). (Figgitt et al., Am. J. Clin. Dermatol., 1(1):67-72 (2000); Foss, Clin. Lymphoma, 1(4):298-302 (2001); Murphy et al., In Bacterial Toxins: Methods and Protocols, Holst O, ed, Humana Press, Totowa, N.J., pp. 89-100 (2000)). A number of other toxophores, most notably ricin toxin and pseudomonas exotoxin A, have been employed in developing both immuntoxins and fusion toxins; however, these molecules have not successfully completed clinical trials and all exhibit VLS as a pronounced side effect (Kreitman, Adv. Pharmacol., 28:193-219 (1994); Puri et al., Cancer Research, 61:5660-5662 (1996); Pastan, Biochim Biophys Acta., 24:1333(2):C1-6 (1997); Frankel et al., Supra (1997); Kreitman et al., Current Opin. Inves. Drugs, 2(9):1282-1293 (2001)).

[0005] VLS arises from protein-mediated damage to the vascular endothelium. In the case of recombinant proteins, immunotoxins and fusion toxins, the damage is initiated by the interaction between therapeutic proteins and vascular endothelial cells. Lindstrom et al. provided evidence that ricin toxin A had direct cytotoxic effects on human umbilical vein vascular epithelial cells but that these effects were not mediated by fibronectin (Lindstrom et al., Blood, 90(6):2323-34 (1997); Lindstrom et al., Methods Mol. Biol., 166:125-35 (2001)). Baluna et al. postulated that the interaction disrupts fibronectin mediated cell-to-cell interactions resulting in the breakdown of vascular integrity, and Baluna further suggested that in the toxin ricin, the interaction is mediated by a conserved three amino acid motif, (x)D(y), where x is L, I, G or V and y is V, L or S (Baluna et al., Int. J. Immunopharmacology, 18(6-7):355-361 (1996); Baluna et al., Proc. Natl. Acad. Sci. USA, 30:96(7):3957-3962, (1999); Baluna et al., Exp Cell Res., 58(2):417-24 (2000)). It was reported that one of the VLS motifs found in ricin toxin, the ‘LDV’ motif, essentially mimics the activity of a subdomain of fibronectin which is required for binding to the integrin receptor. Integrins mediate cell-to-cell and cell-to-extracellular matrix interactions (ECM). Integrins function as receptors for a variety of cell surface and extracellular matrix proteins including fibronectin, laminin, vitronectin, collagen, osteospondin, thrombospondin and von Willebrand factor. Integrins play a significant role in the development and maintenance of vasculature and influence endothelial cell adhesiveness during angiogenesis. Further, it is reported that the ricin ‘LDV’ motif can be found in a rotavirus coat protein, and this motif is important for cell binding and entry by the virus. (Coulson, et al., Proc. Natl. Acad Sci. USA, 94(10):5389-5494 (1997)). Thus, it appears to be a direct link between endothelial cell adhesion, vascular stability and the VLS motifs which mediate ricin binding to human vascular endothelial cells (HUVECs) and vascular leak.

[0006] Mutant dgRTAs were constructed in which this motif was removed by conservative amino acid substitution, and these mutants illustrated fewer VLS effects in a mouse model (Smallshaw et al. Nat Biotechnol., 21(4):387-91 (2003)). However, the majority of these constructs yielded dgRTA mutants that were not as cytotoxic as wild type ricin toxin, suggesting that significant and functionally critical structural changes in the ricin toxophore resulted from the mutations. It should also be noted that no evidence was provided to suggest that the motifs in dgRTA mediated HUVEC interactions and VLS in any other protein. Studies revealed that the majority of the mutant dgRTAs were much less effective toxophores and no evidence was provided to suggest that fusion toxins could be assembled using these variant toxophores.

[0007] DT is composed of three domains: the catalytic domain; transmembrane domain; and the receptor binding domain (Choe et al. Nature, 357:216-222 (1992)). Native DT is targeted to cells that express heparin binding epidermal growth factor-like receptors (Naglish et al., Cell, 69:1051-1061 (1992)). The first generation targeted toxins were initially developed by chemically cross-linking novel targeting ligands to toxins such as DT or mutants of DT deficient in cell binding (e.g. CRM45). (Cawley, Cell 22:563-570 (1980); Bacha et al., Proc. Soc. Exp. Biol. Med., 181(1):131-138 (1986); Bacha et al., Endocrinology, 113(3):1072-1076 (1983); Bacha et al., J. Biol. Chem., 258(3):1565-1570 (1983)). The native cell binding domain or a cross-linked ligand that directs the DT toxophore to receptors on a specific class of receptor-bearing cells must possess intact catalytic and translocation domains. (Cawley et al., Cell, 22:563-570 (1980); vanderSpek et al., J. Biol. Chem., 5:268(16):12077-12082 (1993); vanderSpek et al., J. Biol. Chem., 7(8):985-989 (1994); vanderSpek et al., J. Biol. Chem., 7(8)985-989 (1994); Rosconi, J. Biol. Chem., 10;277(19):16517-161278 (2002)). These domains are critical for delivery and intoxification of the targeted cell following receptor internalization (Greenfield et al., Science, 238(4826)536-539 (1987)). Once the toxin, toxin conjugate or fusion toxin has bound to the cell surface receptor the cell internalizes the toxin bound receptor via endocytic vesicles. As the vesicles are processed they become acidified and the translocation domain of the DT toxophore undergoes a structural reorganization which inserts the 9 transmembrane segments of the toxin into the membrane of the endocytic vesicle. This event triggers the formation of a productive pore through which the catalytic domain of the toxin is threaded. Once translocated the catalytic domain which possess the ADP-ribosyltransferase activity is released into the cytosol of the targeted cell where it is free to poison translation thus effecting the death of the cell (reviewed in vanderSpek et al., Methods in Molecular Biology, Bacterial Toxins: methods and Protocols, 145:89-99, Humana press, Totowa, N.J., (2000)).

[0008] Chemical cross-linking or conjugation results in a variety of molecular species representing the reaction products, and typically only a small fraction of these products are catalytically and biologically active. In order to be biologically active, the reaction products must be conjugated in manner that does not interfere with the innate structure and activity of the catalytic and translocation domains in the toxophore. Resolution of the active or highly active species from the inactive species is not always feasible as the reaction products often possess similar biophysical characteristics, including for example size, charge density and relative hydrophobicity. It is noteworthy that isolation of large amounts of pure clinical grade active product from chemically crosslinked toxins is not typically economically feasible for the production of pharmaceutical grade product for clinical trials and subsequent introduction to clinical marketplace. To circumvent this issue, a genetic DT-based protein fusion toxin in which the native DT receptor-binding domain was genetically replaced with melanocyte-stimulating hormone as a surrogate receptor-targeting domain was created (Murphy et al., PNAS, 83:8258-8262 (1986)). This approach was used with human IL-2 as a surrogate targeting ligand to create DAB₄₈₆IL-2 that was specifically cytotoxic only to those cells that expressed the high-affinity form of the IL-2 receptor (Williams et al., Protein Eng., 1:493-498 (1987)). Subsequent studies of DAB₄₈₆IL-2 indicated that truncation of 97 amino acids from the DT portion of the molecule resulted in a more stable, more cytotoxic version of the IL-2 receptor targeted toxin, DAB₃₈₉IL-2 (Williams et al., J. Biol Chem., 265:11885-889 (1990)). The original constructs (the 486 forms) still possessed a portion of the native DT cell binding domain. The DAB₃₈₉ amino acid residue version contains the C and T domains of DT with the DT portion of the fusion protein ending in a random coil between the T domain and the relative receptor binding domain. A number of other targeting ligands have since been genetically fused to this DT toxophore, DAB₃₈₉. (vanderSpek et al., Methods in Molecular Biology, Bacterial Toxins:Methods and Protoclos., 145:89-99, Humana Press, Totowa, N.J. (2000)). Similar approaches have now been employed with other bacterial proteins and genetic fusion toxins are often easier to produce and purify.

### SUMMARY OF THE INVENTION

[0009] The present invention provides compositions of modified variants of DT that reduce binding to vascular endothelium or vascular endothelial cells, and therefore, reduce the incidence of Vascular Leak Syndrome.

[0010] One aspect of the present invention relates to a composition comprising a polypeptide toxophore from a DT, said polypeptide toxophore comprising amino acid residues 7-9, 29-31 and 290-292 of SEQ ID NO:4, wherein at least one amino acid in said amino acid residues 7-9, 29-3 1or 290-292 of SEQ ID NO:4 has been substituted or deleted.

[0011] Another aspect of the present invention relates to a fusion protein comprising a modified DT mutant or fragment and a non-DT fragment.

[0012] Another aspect of the present invention relates to the use of a modified DT or a fusion protein carrying such modified DT for the treatment of diseases, such as cancer.

[0013] Yet another aspect of the present invention relates to a method of making a modified DT fragment having a reduced binding activity to human vascular endothelial cells (HUVEC) and having a reduced induction of Vascular Leak Syndrome (VLS).

### BRIEF DESCRIPTION OF THE FIGURES

[0014] FIG. 1 is a schematic diagram of DT387. The positions of the (x)D(y) motifs of the toxophore which are implicated in VLS are indicated by triangles and listed below in the table of proposed DT387 and corresponding DAB₃₈₉IL2 (hereinafter “DT387IL2”) mutants. The flexible linker sterically enhances disulfide bond formation between the C-terminal cysteine residue and a Sulfo-LC SPDP modified targeting ligand.

[0015] FIG. 2 is a ribbon diagram and space filling model of native DT showing the presence of (x)D(y) motifs implicated in VLS.

[0016] FIG. 3 shows the nucleic acid and amino acid sequence changes in various DT variants.

[0017] FIG. 4A shows analysis of DT387 toxophore yield by Coomassie.

[0018] FIG. 4B shows analysis of DT387 toxophore yield by Western Blot.

[0019] FIG. 5A and 5B show representative photomicrographs illustrating the levels of fluorescence between wild type DT toxophore mediated HUVEC staining (FIG. 5A) and VLS modified HUVEC staining (FIG. 5B).

[0020] FIG. 6 illustrates HUVEC binding to DT387 and VLS modified DT387 toxophores.

[0021] FIG. 7 is a diagram showing the ADP ribosyltransferase activity of certain DT mutants. ADP ribosyltransferase assay in which the activity of alanine substitute VLS modified DT toxphores or DT387IL2 fusion proteins were compared to fragment A of native DT.

[0022] FIG. 8 depicts an example of Coomassie stained SDS-PAGE analysis of crude and purified refolded samples of DT387EGF fusion protein (DT387(D8EV29A)EGF). Tubes 1-9 not depicted.

[0023] FIG. 9 is a diagram showing the cytotoxicity of 8×10⁻⁹ M DT387(D8EV29A)linker EGF in EGF receptor positive U87MG glioblastoma cells under refolding buffer conditions 1-9.

[0024] FIG. 10 is a diagram showing the cytotoxicity of 4×10⁻⁸ M DT387(D8EV29A)linkerEGF in U87MG cells under refolding buffer conditions 10-18.

[0025] FIG. 11 is a diagram showing the cytotoxicity of DT389EGF and VLS modified DT387linkerEGF fusion proteins, DT387linkerEGF, DT387(D8E,V29A)linker EGF, DEF, DT387(D8S,V29A)linkerEGF, DT387(D8E,V29A,D291E)linkerEGF, DT387(V7A,V29A)linkerEGF, DT387(V29A)linkerEGF, DT387(V7S,V29A)linkerEGF, DT387(D291E)linker IL2 in U87MG cell.

[0026] FIG. 12 is a Coomassie stained SDS-PAGE gel showing the level of purity for the VLS-modified DT387EGF fusion protein tested in FIG. 11.

[0027] FIG. 13 is a diagram showing the cytotoxicity of DT387IL2, DT387(D8S,V29A)linkerIL2, DT387(V7A,V29A,D291E)linkerEL2, DT387(V7A)linkerIL2, DT387(V7S,V29A)linkerIL2, DT387(D8E,V29A)linkerIL2 in IL-2 receptor positive HUT102/6TG cells.

[0028] FIGS. 14 (A) and (B) are a Coomassie stained SDS-PAGE gel (FIG. 14A) and Western blot (FIG. 14B) showing the level of purity for the VLS-modified DT387linkerIL2 fusion proteins tested in FIG. 13.

### DETAILED DESCRIPTION OF THE INVENTION

[0029] The primary objective of the present invention is to provide compositions comprising modified variants of DT that reduce binding to vascular endothelium or vascular endothelial cells, and therefore, reduce the incidence of Vascular Leak Syndrome (hereinafter “VLS”). The second objective of the present invention is to provide methods of making such modified variants of DT that reduce binding to vascular endothelium or vascular endothelial cells. The third objective of the present invention is to provide methods of treating various diseases, such as cancer, by using modified variants of DT or by using a fusion protein comprising modified variants of DT and non-DT protein.

[0030] One aspect of the present invention relates to genetically modified molecules of diphtheria toxin (DT) having reduced binding to human vascular endothelial cells (HUVECs). These modified DT molecules are hereinafter referred to as “DT variants.” The invention specifically relates to DT variants having one or more conservative changes within the (x)D(y) motifs of the DT molecule, i.e., at residues 6-8 (VDS), residues 28-30 (VDS), and residues 289-291 (IDS) of the native DT sequence (SEQ ID NO:1), or at residues 7-9 (VDS), residues 29-31 (VDS), and residues 290-292 (IDS) of the SEQ ID NO:4. Since the (x)D(y) motifs are referred to as “VLS motifs,” the DT variants with modified (x)D(y) motif are sometimes referred to as “VLS-modified DT molecules.”

[0031] Conservative changes are defined as those amino acid substitutions which permit the alteration of the native sequence within these regions but do not impair the cytotoxicity of the toxophore. These conservative changes would not include those that regenerate the VDS/IDS sequences responsible for mediating the interaction with endothelial cells. Such non-native recombinant sequences therefore comprise a novel series of mutants that maintain the native function of the unique domains of diphtheria toxin while significantly decreasing their ability to interact with vascular endothelial cells.

[0032] In one embodiment, the DT variants of the present invention contain at least one conservative change within one of the (x)D(y) motifs of the DT molecule, i.e., within residues 6-8 (VDS), residues 28-30 (VDS), and residues 289-291 (IDS) of SEQ ID NO:1 to eliminate motifs that are associated with VLS and thereby reduce the clinical adverse effects commonly associated with this syndrome. The DT variants of the present invention, however, are as effective and efficient as DT387 in their ability to facilitate the delivery of its catalytic domain to the cytosol of targeted eukaryotic cells when incorporated into protein fusion toxins. DT387 (SEQ ID NO:4) is a truncated DT protein comprising amino acid residues 1-386 (SEQ ID NO:2) of the native DT protein including the catalytic domain and the translocation domain.

[0033] In another embodiment, in addition to the modification in the (x)D(y) motifs, the DT variants may further comprise a deletion or substitution of 1 to 30 amino acids of SEQ ID NO:4, preferably 1 to 10 amino acids, most preferably 1-3 amino acids.

[0034] To produce DT variants with a modified (x)D(y) sequence, one could delete or substitute another amino acid for the aspartic acid (D), or insert one or more amino acids at or adjacent to its position. Any amino acid that may replace the (D) residue in the sequence as a consequence of a deletion or mutation event must retain the ability to effectively deliver the catalytic domain of DT to a targeted cell within the context of a fusion protein, and not reconstitute an intact VLS motif.

[0035] Alternatively the (x) residue could be deleted, substituted, or moved by the insertion of one or more amino acids, to remove the (x)D(y) sequence. Any amino acid that may replace the (x) residue in the sequence as a consequence of the deletion or mutation event should preferably not be leucine (L), isoleucine (I), glycine (G) or valine (V). The (y) residue could be deleted, substituted, or moved by the insertion of one or more amino acids, to remove the (x)D(y) sequence. Any amino acid that may replace the (y) residue in the sequence as a consequence of the deletion or mutation event should preferably not be valine (V), leucine (L) or serine (S).

[0036] In a preferred embodiment, the DT variants of the present invention contain at least one of the mutations selected from the group of V7A, V7S, D8S, D8E, V29A, I290A, D291S, and D291E. It should be noted that the first amino acid residue of mature processed native DT protein corresponds to the second amino acid residue of the DT variants (recombinant expression requires insertion of met residue). Accordingly, residues 6-8 (VDS), 28-30 (VDS) and 289-291 (IDS) of the native DT correspond to residues 7-9, 29-31, and 290-292 of the DT variants.

[0037] In another preferred embodiment, the DT variants of the present invention contain a double mutation selected from the group of V7AV29A, V7SV29A, D8SV29A, D8SD291S, D8EV29A, and V29AD291E.

[0038] In another preferred embodiment, the DT variants of the present invention contain a triple mutation selected from the group of V7AV29AD291E and V7AV29AI290A.

[0039] In yet another preferred embodiment, the DT variants comprise an amino acid sequence recited in one of SEQ ID NOs:28-38. It is conceivable that other residues that are positioned in the physical region, three-dimensional space, or vicinity of the HUVEC binding site and/or the (x)D(y) motif may be mutated or altered to abrogate, reduce, or eliminate VLS. The amino acids targeted for mutation in the flanking regions include amino acids on or near the surface of a native DT protein. The alteration may remove or substitute a charged residue in the region of a (x)D(y) motif, which may negate or reverse the charge in a particular area on the surface of the protein. The alteration may also change size and/or hydrophilic nature of an amino acid in the physical region, space or vicinity of the (x)D(y) sequence or active site of a protein.

[0040] In certain aspects, mutagenesis of nucleic acids encoding peptides, polypeptides or proteins may be used to produce the desired mutations in the (x)D(y) and flanking sequences of the DT variants. Mutagenesis may be conducted by any means disclosed herein or known to one of ordinary skill in the art.

[0041] One particularly useful mutagenesis technique is alanine scanning mutagenesis in which a number of residues are substituted individually with the amino acid alanine so that the effects of losing side-chain interactions can be determined, while minimizing the risk of large-scale perturbations in protein conformation [(Cunningham et al., Science, 2:244(4908):1081-5 (1989)].

[0042] As specific amino acids may be targeted, site-specific mutagenesis is a technique useful in the preparation of individual peptides, or biologically functional equivalent proteins or peptides, through specific mutagenesis of the underlying DNA. The technique further provides a ready ability to prepare and test sequence variants, incorporating one or more of the foregoing considerations, by introducing one or more nucleotide sequence changes into the DNA. Site-specific mutagenesis allows the production of mutants through the use of specific oligonucleotide sequences which encode the DNA sequence of the desired mutation, as well as a sufficient number of adjacent nucleotides, to provide a primer sequence of sufficient size and sequence complexity to form a stable duplex on both sides of the mutation site being traversed. Typically, a primer of about 17 to 25 nucleotides in length is preferred, with about 5 to 10 residues on both sides of the junction of the sequence being altered.

[0043] In general, the technique of site-specific mutagenesis is well known in the art. Briefly, a bacteriophage vector that will produce a single stranded template for oligonucleotide directed PCR mutagenesis is employed. These phage vectors, typically M13, are commercially available and their use is generally well known to those skilled in the art. Similarly, double stranded plasmids are also routinely employed in site directed mutagenesis, which eliminates the step of transferring the gene of interest from a phage to a plasmid. Synthetic oligonucleotide primers bearing the desired mutated sequence are used to direct the in vitro synthesis of modified (desired mutant) DNA from this template and the heteroduplex DNA used to transform competent E. Coli for the growth selection and identification of desired clones. Alternatively, a pair of primers may be annealed to two separate strands of a double stranded vector to simultaneously synthesize both corresponding complementary strands with the desired mutation(s) in a PCR reaction.

[0044] In one embodiment, the Quick Change site-directed mutagenesis method using plasmid DNA templates as described by Sugimoto et al. is employed (Sugimoto et al., Annal. Biochem., 179(2):309-311 (1989)). PCR amplification of the plasmid template containing the insert target gene of insert is achieved using two synthetic oligonucleotide primers containing the desired mutation. The oligonucleotide primers, each complementary to opposite strands of the vector, are extended during temperature cycling by mutagenesis-grade PfuTurbo DNA polymerase. On incorporation of the oligonucleotide primers, a mutated plasmid containing staggered nicks is generated. Amplified un-methylated products are treated with Dpn I to digest methylated parental DNA template and select for the newly synthesized DNA containing mutations. Since DNA isolated from most E. Coli strains is dam methylated, it is susceptible to Dpn I digestion, which is specific for methylated and hemimethylated DNA. The reaction products are transformed into high efficiency strains of E. coli to obtain plasmids containing the desired mutants.

[0045] The preparation of sequence variants of the selected gene using site-directed mutagenesis is provided as a means of producing potentially useful species and is not meant to be limiting, as there are other ways in which sequence variants of genes may be obtained. For example, recombinant vectors encoding the desired gene may be treated with mutagenic agents, such as hydroxylamine, to obtain sequence variants. These basic techniques, the protocols for sequence determination, protein expression and analysis are incorporated by reference to citations in this specification and are generally accessible to those reasonably skilled in the art within Current Protocols in Molecular Biology (Fred M. Ausubel, Roger Brent, Robert E. Kingston, David D. Moore, J.G. Seidman, John A. Smith, Kevin Struhl, Editors John Wiley and Sons Publishers (1989)).

[0046] The present invention also provides DT fusion proteins. A DT fusion protein contains a DT-related polypeptide (e.g., a DT variant of the present invention) and a non-DT polypeptide fused in-frame to each other. The DT-related polypeptide corresponds to all or a portion of DT variant having reduced binding to human vascular endothelial cells. In one embodiment, a DT fusion protein comprises at least one portion of a DT variant sequence recited in one of SEQ ID NOs:11-27.

[0047] Preferably, a DT-fusion protein of the present invention is produced by standard recombinant DNA techniques. For example, DNA fragments coding for the different polypeptide sequences are ligated together in-frame in accordance with conventional techniques, for example, by employing blunt-ended or stagger-ended termini for ligation, restriction enzyme digestion to provide for appropriate termini, filling-in of cohesive ends as appropriate, alkaline phosphatase treatment to avoid undesirable joining, and enzymatic ligation. In another embodiment, the fusion gene can be synthesized by conventional techniques including automated DNA synthesizers. Alternatively, PCR amplification of gene fragments can be carried out using anchor primers which give rise to complementary overhangs between two consecutive gene fragments which can subsequently be annealed and reamplified to generate a chimeric gene sequence.

[0048] A peptide linker sequence may be employed to separate the DT-related polypeptide from non-DT polypeptide components by a distance sufficient to ensure that each polypeptide folds into its secondary and tertiary structures. Such a peptide linker sequence is incorporated into the fusion protein using standard techniques well known in the art. Suitable peptide linker sequences may be chosen Th based on the following factors: (1) their ability to adopt a flexible extended conformation; (2) their inability to adopt a secondary structure that could interact with functional epitopes on the DT-related polypeptide and non-DT polypeptide; and (3) the lack of hydrophobic or charged residues that might react with the polypeptide functional epitopes. Preferred peptide linker sequences contain gly, asn and ser residues. Other near neutral amino acids, such as thr and ala, may also be used in the linker sequence. Amino acid sequences which may be usefully employed as linkers include those disclosed in Maratea et al., Gene, 40:39-46, 1985; Murphy et al., Proc. Natl. Acad. Sci. USA, 83:8258-8262, 1986; U.S. Pat. No. 4,935,233 and U.S. Pat. No. 4,751,180. The linker sequence may generally be from 1 to about 50 amino acids in length. Linker sequences are not required when the DT-related polypeptide and non-DT polypeptide have non-essential N-terminal amino acid regions that can be used to separate the fumctional domains and prevent steric interference. For example, DT389/DT387-linker has a sequence of SEQ ID NO:5, DT380-linker has sequence of SEQ ID NO:6. The non-DT polypeptides can be any polypeptide.

[0049] In one embodiment, the non-DT polypeptide is a cell-specific binding ligand. The specific-binding ligands used in the invention can contain an entire ligand, or a portion of a ligand which includes the entire binding domain of the ligand, or an effective portion of the binding domain. It is most desirable to include all or most of the binding domain of the ligand molecule.

[0050] Specific-binding ligands include but not limited to: polypeptide hormones, chimeric toxins, e.g., those made using the binding domain of α-MSH, can selectively bind to melanocytes, allowing the construction of improved DT-MSH chimeric toxins useful in the treatment of melanoma. (Murphy, J. R., Bishai, W., Miyanohara, A., Boyd, J., Nagle, S., Proc. Natl. Acad. Sci. US.A., 83(21):8258-8262 (1986)). Other specific-binding ligands which can be used include insulin, somatostatin, interleukins I and III, and granulocyte colony stimulating factor. Other useful polypeptide ligands having cell-specific binding domains are follicle stimulating hormone (specific for ovarian cells), luteinizing hormone (specific for ovarian cells), thyroid stimulating hormone (specific for thyroid cells), vasopressin (specific for uterine cells, as well as bladder and intestinal cells), prolactin (specific for breast cells), and growth hormone (specific for certain bone cells). Specific-binding ligands which can be used include cytokines. Examples of cytokines include, but are not limited to, IL-1, IL-2, IL-3, IL-4, IL-5, IL-6, IL-7, IL-8, IL-9, IL-10, IL-11, IL-12, IL-13, IL-14, IL-15, β-interferon, α-interferon (INF α), INFγ, angiostatin, thrombospondin, endostatin, METH-1, METH-2, GM-CSF, G-CSF, M-CSF, tumor necrosis factor (TNF), SVEGF, TGFβ, Flt3 and B-cell growth factor. IL-2 is of particular importance because of its role in allergic reactions and autoimmune diseases such as systemic lupus erythmatosis (SLE), involving activated T cells. DT fusion protein made using B-cell growth factor can be used as immunosuppressant reagents which kill proliferating B-cells, which bear B-cell growth factor receptors, and which are involved in hypersensitivity reactions and organ rejection. Other preferred cytokines include Substance P (Benoliel et al., Pain, 79(2-3):243-53 (1999)), VEGF (Hotz et al., J Gastrointest Surg., 6(2):159-66 (2002)), IL3 (Jo et al., Protein Exp Purif. 33(l):123-33 (2004)) and GMCSF (Frankel et al., Clin Cancer Res, 8(5):1004-13 (2002)). VLS modified DT fusion toxins using these ligands are useful in treating cancers or other diseases of the cell type to which there is specific binding.

[0051] For a number of cell-specific ligands, the region within each such ligand in which the binding domain is located is now known. Furthermore, recent advances in solid phase polypeptide synthesis enable those skilled in this technology to determine the binding domain of practically any such ligand, by synthesizing various fragments of the ligand and testing them for the ability to bind to the class of cells to be labeled. Thus, the chimeric genetic fusion toxins of the invention need not include an entire ligand, but rather may include only a fragment of a ligand which exhibits the desired cell-binding capacity. Likewise, analogs of the ligand or its cell-binding region having minor sequence variations may be synthesized, tested for their ability to bind to cells, and incorporated into the hybrid molecules of the invention. Other potential ligands include antibodies (generally monoclonal) or antigen-binding, single-chain analogs of monoclonal antibodies, where the antigen is a receptor or other moiety expressed on the surface of the target cell membrane. The antibodies most useful are those against tumors; such antibodies are already well-known targeting agents used in conjunction with covalently bound cytotoxins. In the present invention, the anti-tumor antibodies (preferably not the whole antibody, but just the Fab portion) are those which recognize a surface determinant on the tumor cells and are internalized in those cells via receptor-mediated endocytosis; antibodies which are capped and shed will not be as effective.

[0052] Another aspect of the present invention pertains to vectors containing a polynucleotide encoding a DT variant or a DT fusion protein. One type of vector is a “plasmid,” which includes a circular double-stranded DNA loop into which additional DNA segments can be ligated. In the present specification, “plasmid” and “vector” can be used interchangeably as the plasmid is the most commonly used form of vector. However, the invention is intended to include such other forms of vectors, such as expression vectors, and gene delivery vectors.

[0053] The expression vectors of the invention comprise a polynucleotide encoding DT variant or a DT fusion protein in a form suitable for expression of the polynucleotide in a host cell. The expression vectors generally have one or more regulatory sequences, selected on the basis of the host cells to be used for expression, which is operatively linked to the polynucleotide sequence to be expressed. It will be appreciated by those skilled in the art that the design of the expression vector can depend on such factors as the choice of the host cell to be transformed, the level of expression of protein desired, and the like. The expression vectors of the invention can be introduced into host cells to produce proteins or peptides, including fusion proteins or peptides, encoded by polynucleotides as described herein (e.g., a DT variant or a DT fusion protein, and the like).

[0054] The expression vectors of the present invention can be designed for expression of a DT variant or a DT fusion protein in prokaryotic or eukaryotic cells. It should be noted that the presence of a single DT molecule inside an eukaryotic cell would kill the cell. Specifically, the toxin binds to EF-tu which is required for translation and ribosylation. Accordingly, DT can only be expressed in cells with modified EF-tu that is no longer recognized by DT. (see, e.g., Liu et al., Protein Expr Purif, 30:262-274 (2003); Phan et al., J. Biol. Chem., 268(12):8665-8 (1993); Chen et al., Mol. Cell Biol., 5(12):3357-60 (1985); Kohne et al., Somat Cell Mol. Genet., 11(5):421-31 (1985); Moehring et al., Mol. Cell Biol., 4(4):642-50 (1984)). In addition, a DT variant or a DT fusion protein can be expressed in bacterial cells such as E. coli [Bishai et al., J Bacteriol 169(11):5140-51 (1987)]. Consideration must be given to the expression and activity of the types and levels of host protease expression, and this is dependent upon the cleavage site present in the engineered DT toxophore. The innate expression host protease expression profile could negatively impact the yields of DT fusion toxin produced [Bishai et al., Supra (1987)]. To the degree that this requisite cleavage site can be altered to modulate the cell selectivity of resultant fusion proteins, it is envisioned that such cleavage site mutants could be in VLS-modified toxophores (Gordon etal., Infect Immun, 63(1):82-7 (1995); Gordon etal., Infect Immun, 62(2):333-40 (1994); Vallera et al., J Natl. Cancer Inst., 94:597-606 (2002); Abi-Habib et al., Blood., 104(7):2143-8 (2004)]. Alternatively, the expression vector can be transcribed and translated in vitro.

[0055] The present invention further provides gene delivery vehicles for the delivery of polynucleotides to cells, tissue, or a mammal for expression. For example, a polynucleotide sequence of the present invention can be administered either locally or systemically in a gene delivery vehicle. These constructs can utilize viral or non-viral vector approaches in in vivo or ex vivo modality. Expression of such coding sequences can be induced using endogenous mammalian or heterologous promoters. Expression of the coding sequence in vivo can be either constitutive or regulated. The invention includes gene delivery vehicles capable of expressing the contemplated polynucleotides including viral vectors. For example, Qiao et al., developed a system employing PG13 packaging cells produce recombinant retroviruses carrying a DT fragment which kills cancer cell and provides a method for using DT as component a suicide vector. Qiao et al., J. Virol. 76(14):7343-8 (2002).

[0056] Expressed DT-mutants and DT-fusion proteins can be tested for their fumctional activity. Methods for testing DT activity are well-known in the art. For example, the VLS effect of DT-mutants and DT-fusion proteins can be tested in HUVECs as described in Example 2. The ribosyltransferase activity of DT variants or DT-fusion proteins can be tested by the ribosyltransferase assay described in Example 3. The cytotoxicity of DT variants or DT-fusion proteins can be tested as described in Examples 4-5.

[0057] DT-mutants and DT-fusion proteins having reduced binding to HUVECs while maintaining the cytotoxicity can be used for the treatment of various cancers, including, but not limited to breast cancer, colon-rectal cancer, lung cancer, prostate cancer, skin cancer, osteocarcinoma, or liver cancer and others.

[0058] In an exemplary embodiment, the VLS modified DT fusion toxins of the invention are administered to a mammal, e.g., a human, suffering from a medical disorder, e.g., cancer, or non-malignant conditions characterized by the presence of a class of unwanted cells to which a targeting ligand can selectively bind.

[0059] The pharmaceutical composition can be administered orally or by intravenouslly. For example, intravenous now possible by cannula or direct injection or via ultrasound guided fine needle. Mishra (Mishra et al., Expert Opin. Biol., 3(7):1173-1180 (2003)) provides for intratumoral injection.

[0060] The term “therapeutically effective amount” as used herein, is that amount achieves at least partially a desired therapeutic or prophylactic effect in an organ or tissue. The amount of a modified DT necessary to bring about prevention and/or therapeutic treatment of the disease is not fixed per se. The amount of VLS modified DT fusion toxin administered will vary with the type of disease, extensiveness of the disease, and size of species of the mammal suffering from the disease. Generally, amounts will be in the range of those used for other cytotoxic agents used in the treatment of cancer, although in certain instances lower amounts will be needed because of the specificity and increased toxicity of the VLS-modified DT fusion toxins. In certain circumstances and as can be achieved by, currently available techniques for example (cannulae or convection enhanced delivery, selective release) attempts to deliver enhanced locally elevated fusion toxin amounts to specific sites may also be desired. (Laske et al., J Neurosurg., 87:586-5941(997); Laske et al., Nature Medicine, 3:1362-1368 (1997), Rand et al., Clin. Cancer Res., 6:2157-2165 (2000); Engebraaten et al., J. Cancer, 97:846-852 (2002), Prados et al., Proc. ASCO, 21:69b (2002), Pickering et al., J CLin Invest, 91(2):724-9 (1993)).

[0061] The invention is further directed to pharmaceutical compositions comprising a DT variant or DT-fusion protein described hereinabove and a pharmaceutically acceptable carrier.

[0062] As used herein the language “pharmaceutically acceptable carrier” is intended to include any and all solvents, solubilizers, stabilizers, absorbents, bases, buffering agents, lubricants, controlled release vehicles, diluents, emulsifying agents, humectants, lubricants, dispersion media, coatings, antibacterial or antifungal agents, isotonic and absorption delaying agents, compatible with pharmaceutical administration. The use of such media and agents for pharmaceutically active substances is well-known in the art. See e.g., A.H. Kibbe Handbook of Pharmaceutical Excipients, 3rd ed. Pharmaceutical Press London, UK (2000). Except insofar as any conventional media or agent is incompatible with the active compound, use thereof in the compositions is contemplated. Supplementary agents can also be incorporated into the compositions.

[0063] A pharmaceutical composition of the invention is formulated to be compatible with its intended route of administration. Examples of routes of administration include parenteral, e.g., intravenous, intradermal, subcutaneous, oral (e.g., inhalation), transdermal (topical), transmucosal, and rectal administration. Solutions or suspensions used for parenteral, intradermal, or subcutaneous application can include the following components: a sterile diluent such as water for injection, saline solution, fixed oils, polyethylene glycols, or glycerine; propylene glycol or other synthetic solvents; antibacterial agents such as benzyl alcohol or methyl parabens; antioxidants such as ascorbic acid or sodium bisulfate; chelating agents such as ethylene-diaminetetracetic acid; buffers such as acetates, citrates or phosphates and agents for the adjustment of tonicity such as sodium chloride or dextrose pH which can be adjusted with acids or bases, such as hydrochloric acid or sodium hydroxide. The parenteral preparation can be enclosed in ampoules, disposable syringes or multiple dose vials made of glass or plastic.

[0064] Mainly if not exclusively this pharmaceutical compositions suitable for injectable use include sterile aqueous solutions (where water soluble) or dispersions and sterile powders for the extemporaneous preparation of sterile injectable solutions or dispersion. For intravenous administration, suitable carriers include physiological saline, bacteriostatic water, Cremophor EL™ (BASF, Parsippany, N.J.) or phosphate buffered saline (PBS). In all cases, the injectable composition should be sterile and should be fluid to the extent that easy syringability exists. It must be stable under the conditions of manufacture and storage and must be preserved against the contaminating action of microorganisms such as bacteria and fungi. The carrier can be a solvent or dispersion medium containing, for example, water, ethanol, polyol (for example, glycerol, propylene glycol, and liquid polyethylene glycol, and the like), and suitable mixtures thereof. Prolonged absorption of the injectable compositions can be brought about by including in the composition an agent which delays absorption (e.g. aluminum monostearate or gelatin), however, any stabilizer or additive posited by this disclosure envisioned for use in protein fusion toxin delivery will be compatible with protein based therapeutics.

[0065] Sterile injectable solutions can be prepared by incorporating the active ingredient (e.g., a viral or non viral vector) in the required amount in an appropriate solvent with one or a combination of ingredients enumerated above, as required, followed by filtered sterilization. Generally, dispersions are prepared by incorporating the active ingredient into a sterile vehicle which contains a basic dispersion medium and the required other ingredients from those enumerated above. In the case of sterile powders for the preparation of sterile injectable solutions, the preferred methods of preparation are vacuum drying and freeze drying which yields a powder of the active ingredient plus any additional desired ingredient from a previously sterile-filtered solution thereof.

[0066] Toxicity and therapeutic efficacy of such ingredient can be determined by standard pharmaceutical procedures in cell cultures or experimental animals, e.g., for determining the LD50 (the dose lethal to 50% of the population) and the ED50 (the dose therapeutically effective in 50% of the population). The dose ratio between toxic and therapeutic effects is the therapeutic index and it can be expressed as the ratio LD50/ED50. Compounds which exhibit large therapeutic indices are preferred. While compounds that exhibit toxic side effects may be used, care should be taken to design a delivery system that targets such compounds to the site of affected tissue in order to minimize potential damage to noncancerous and otherwise healthy cells and, thereby, reduce side effects.

[0067] The data obtained from the cell culture assays and animal studies can be used in formulating a range of dosage for use in humans. The dosage of such compounds lies preferably within a range of circulating concentrations that include the ED50 with little or no toxicity. The dosage may vary within this range depending upon the dosage form employed and the route of administration utilized. For any compound used in the method of the invention, the therapeutically effective dose can be estimated initially from cell culture assays. A dose may be formulated in animal models to achieve a circulating plasma concentration arrange that includes the IC50 (i.e., the concentration of the test compound which achieves a half-maximal inhibition of symptoms) as determined in cell culture and as presented below examples 4-5. Such information can be used to more accurately determine useful doses in humans. Levels in plasma may be measured, for example, by high performance liquid chromatography. The pharmaceutical compositions can be included in a container, pack, or dispenser together with instructions for administration.

[0068] The present invention is further illustrated by the following examples which should not be construed as limiting. The contents of all references, patents and published patent applications cited throughout this application, as well as the Figures and Tables, are incorporated herein by reference.

### EXAMPLE 1

### Construction Expression and Purification of DT Variant and DT-Fusion Proteins

[0069] 1 (a) Construction of DT Variant and DT-Fusion Proteins

[0070] A truncated DT-based toxophore comprising a methionine residue at the N-terminus, amino acid residues 1 through 386 (SEQ ID NO:2) of the native DT (now residues 2-387 in the truncated toxophore), and two additional amino acids residues His and Ala at the C-terminal was constructed. The inclusion of the His and Ala residues was resulted from additional nucleotide sequences introduced during the cloning process. This construct is designated as DT387 (SEQ ID NO:4). A schematic diagram of DT387 is shown in FIG. 1 which is equivalent to the DAB389 construct described by Williams et al. with the exception that codon was altered and optimized for E. Coli rather than C. diphtheria. A similar construct containing amino acid residues 1 through 379 of the native DT, with a methionine residue at the N-terminal, was also constructed, which was designated was DT380 (SEQ ID NO:3). A DT380 variant with a linker and caboxy terminal cysteine was used to determine the effects of VLS mutations on ribosyltransferase activities and to determine propensity to induce VLS as a function of HUVEC binding.

[0071] As shown in FIG. 2, native DT contains three (x)D(y) motifs at residues 6-8 (VDS), residues 28-30 (VDS), and residues 289-291 (IDS). (The number of the residues in the genetic constructs is +1 with respect to native DT). Briefly, site directed mutagenesis was employed to alter the (x)D(y) motif in DT387. A Stratagene Quickchange mutagenesis kit was used to construct the mutations. Oligonucleotide primers were designed to alter encoding residues within the (x)D(y) motif implicated in VLS.

[0072] Table 1 provides a list of all the DT mutants that were created, expressed in E. coli, partially purified (not to absolute homogeneity) and tested for cytotoxicity. The corresponding nucleic acid and amino acid sequence changes are shown in FIG. 3. The mutants were tested in the context of protein fusion toxin genetically fuised to sequences encoding either human interleukin 2 or human epidermal growth factor.

TABLE 1
Mutant DT toxophores

| SINGLE MUTANT | SEQ ID NOs |
|---|---|
| DT387 (V7A) | 28 |
| DT387 (D8S) | 29 |
| DT387 (ΔD8) | 44 |
| DT387 (V7S) | 30 |
| DT387 (D8E) | 31 |
| DT387 (V29A) | 32 |
| DT387 (V290A) | 33 |
| DT387 (D291E) | 34 |
| DOUBLE MUTANT | SEQ ID NO |
| DT387 (V7A, V29A) | 35 |
| DT387 (V7S, V29A) | 36 |
| DT387 (D8E, V29A) | 37 |
| DT387 (D8S, V29A) | 38 |
| DT387 (V29A, D291E) | 39 |
| TRIPLE MUTANT | SEQ ID NO |
| DT387 (V7A, V29A, I290A) | 40 |
| DT387 (V7A, V29A, D291E) | 41 |

[0073] A number of DT-fusion proteins were also expressed and purified. These proteins and their corresponding DT counterparts are listed in Table 2.

TABLE 2
DT-fusion proteins and control proteins.

| | SEQ ID NO |
|---|---|
| Fusion proteins | |
| DT387EGF/DAB389 EGF | 7 |
| DT387 linker EGF/DAB389 linker EGF | 8 |
| DT387IL2/DAB389IL-2 | 9 |
| DT387 linker IL2/DAB389 linker IL2 | 10 |
| DT387(V7A) linkerIL2 | 11 |
| DT387(D8S) linker IL2 | 12 |
| DT387(D8E) linker IL2 | 13 |
| DT387(V29A) linker IL2 | 14 |
| DT387(I290A) linker IL2 | 15 |
| DT387(D291E) linker IL2 | 16 |
| DT387(V7AV29A) linker IL2 | 17 |
| DT387(V7AV29AD291E) linker IL2 | 18 |
| DT387(D8SV29A) linker IL2 | 19 |
| DT387(V7SV29A) linker IL2 | 42 |
| DT387(D8EV29A) linker IL2 | 43 |
| DAB389(V7AV29AI290A) linker IL2 | 20 |
| DT387(V29A) linker EGF | 21 |
| DT387(D291E) linker EGF | 22 |
| DT387(D8EV29A) linker EGF | 23 |
| DT387(V7SV29A) linker EGF | 24 |
| DT387(V7AV29A) linker EGF | 25 |
| DT387(D8EV29AD291E) linker EGF | 26 |
| DT387(D8SV29A) linker EGF | 27 |
| DT387(V7A)IL2 | 46 |
| DT387(D8S)IL2 | 47 |
| DT387(D8E)IL2 | 48 |
| DT387(V29A)IL2 | 49 |
| DT387(I290A)IL2 | 50 |
| DT387(D291E)IL2 | 51 |
| DT387(V7AV29A)IL2 | 52 |
| DT387(V7AV29AD291E)IL2 | 53 |
| DT387(D8SV29A) IL2 | 54 |
| DT387(V7SV29A) IL2 | 55 |
| DT387(D8EV29A) IL2 | 56 |
| DAB389(V7AV29AI290A) IL2 | 57 |
| DT387(V29A) EGF | 58 |
| DT387(D291E) EGF | 59 |
| DT387(D8EV29A) EGF | 60 |
| DT387(V7SV29A) EGF | 61 |
| DT387(V7AV29A) EGF | 62 |
| DT387(D8EV29AD291E) EGF | 63 |
| DT387(D8SV29A) EGF | 64 |
| Corresponding DT counterparts | |
| DT387/DAB389 | 4 |

[0074] 1 (b) Expression and Purification of DT Variants and DT-Fusion Proteins

[0075] Plasmid constructs encoding truncated DT protein, DT mutants, and DT-fusion protein were transformed into E. coli HMS 174 (DE3) cells. E. coli HMS 174 is a protease-deficient strain in which over-expression of recombinant proteins can be achieved. Induction of the recombinant protein expression was obtained by addition of isopropylthiogalactosidase (ITPG) to E. coli HMS 174. Following incubation, the bacterial cells were harvested by centrifugation and lysed, and the recombinant protein was further purified from inclusion body preparations as described by Murphs and vanderSpek, Methods in Molecular Biology, Bacterial Toxins:methods andprotocols, 145:89-99 Humana press, Totowa, N.J. (2000). The crude protein preparations were contaminated with endotoxin levels of between 2.5×10⁴ and 2.5×10⁵ EU/ml. It was necessary to remove endotoxins from the protein preparations to assure that effects on HUVECs are from VLS and not due to the presence of the endotoxins. Endotoxin was removed to <250 EU/ml by passage over an ion-exchange resin. As shown in FIG. 4, separation of breakdown products from full-length material also occurred during the ion-exchange chromatography. After another final purification over ion exchange resin endotoxin was reduced to <25 EU/ml and the toxophore was tested for VLS as a function of HUVEC cell binding in vitro. FIG. 4 is the analysis of DT387 toxophore yield by Coomassie and Western Blot. Samples from pilot production process described above resolved by SDS Polyacrylamide Gel Electrophoresis (PAGE). Samples 7 through 13 elute from column with less than 250 EU/ml [initial levels >25,000 EU/ml] and as essentially pure DT toxophore. Molecular weight standards are indicated (kDa). An anti-DT antibody was used for the Western blot.

[0076] Some of the constructs are more difficult to express and purify. Mutations that result in stable constructs with adequate expression that do not affect ribosyltransferase activity of the DT387 toxophore were subsequently tested for targeted cytotoxicity in the corresponding VLS modified DT-EGF and VLS modified DT-IL-2 protein fusion toxins (Examples 4 and 5 respectively).

[0077] As described in more detail in Examples 2-4, DT387, VLS modified DT387EGF and DT387IL-2 have been used to distinguish between effects of the VLS mutations on catalytic activity, VLS activity and effective delivery of the targeted protein fusion toxins to the cytosol of target cells.

### EXAMPLE 2

### Binding of DT Toxophores to HUVEC in vitro

[0078] Human vascular endothelial cells were maintained in EGM media (obtained from Cambrex, Walkersville, Md.). Sub-confluent early passage cells were seeded at equivalent cell counts onto plastic cover slips. Purified, endotoxin free wild type DT toxophore and mutants DT38(V7AV29A)gscys and DT380(D8SD291S)gscys were labeled with the fluorescent tag F-150 (Molecular Probes, Eugene, Oreg.) through chemical conjugation. HUVECs were incubated with equivalent amounts of the labeled toxophores. The media was then aspirated, the cells washed and then, fixed and prepared for analysis. Examination of the cells on cover slips from different treatment groups permitted the analysis of the number of cells labeled by the fluorescent toxophore. No targeting ligand was present on the toxophore, and consequently, the level of HUVEC interaction was proportional only to the toxophores affinity for HUVECs. Comparisons were carried out using a fluorescent microscope and comparing the number of cells labeled from at least ten independent fields, different coverslips or different slids. DAPI stain was used to localize cells, particularly in the case of the mutant constructs as cell labeling was not readily apparent. 4′-6-Diamidino-2-phenylindole (DAPI) is known to form fluorescent complexes with natural double-stranded DNA, as such DAPI is a useful tool in various cytochemical investigation. When DAPI binds to DNA, its fluorescence is strongly enhanced. Thus, DAPI serves as a method of labeling cell nuclei. In contrast, cells treated with F-150DT toxophore were easily observed. To facilitate that quantification of the mutant DT toxophore constructs the signal intensity and change in background signal were also increased.

[0079] FIGS. 5A and 5B show representative photomicrographs illustrating the levels of fluorescence between wild type DT toxophore mediated HUVEC staining and VLS modified HUVEC staining. There is a discemable difference in the number of cells labeled and the intensity of the labeled cells using the native DT toxophore molecule versus the VLS modified molecules. As shown in FIG. 6, this change in labeling accounts for the greater than ten fold decrease in average fluorescence observed when a VLS modified DT toxophore is employed to label HUVECs.

### EXAMPLE 3

### VLS Mutants Retain ADP-Ribosyltransferase Activity

[0080] Ribosome inactivating protein toxins such as diphtheria toxin catalyze the covalent modification elongation factor tu (EF-tu). Ribosylation of a modified histidine residue in EF-tu halts protein systhesis at the ribosome and results in cell death. Ribosyltransferase assays to determine catalytic activity of the DT387 mutants are performed in 50 mM Tris-Cl, pH8.0, 25 mM EDTA, 20 mM Dithiothreitol, 0.4 mg/ml purified elongation factor tu, and 1.0 pM [³²P]-NAD⁺ (10 mCi/ml, 1000 Ci.mmol, Amersham-Pharmacia). The purified mutant proteins are tested in a final reaction volume of 40 μl. The reactions are performed in 96 well, V-bottom microtiter plates (Linbro) and incubated at room temperature for an hour. Proteins are precipitated by addition of 200 μl 10% TCA and collected on glass fiber filters, and radioactivity dis etermined by standard protocols.

[0081] As shown in FIG. 7, DT mutants DT387(V7A), DT387(V7A)linkerIL-2, DT387(V7AV29A), and DT387(V7AV29A)linkerIL-2 exhibited ADP ribosyltransferase activity that was equivalent or higher than that exhibited by fragment A of native DT.

### EXAMPLE 4

### VLS Mutants Suitable for DT-Fusion Proteins—VLS-Modified DTEGF

[0082] The ability to create, express and obtain selective receptor-specific fusion toxins using VLS modified DT-based toxophores is central to the disclosure. Proteins expressed from gene fusions between the modified toxophore and a specific targeting ligand allow the development of fusion toxins that can be used as research tools, as in vitro components of developing cell therapies and in vivo as therapeutics.

[0083] Cells integrate a variety of signals required for the maintenance of homeostasis and normal tissue function. These signals include soluble factors liberated by adjacent cells, regional tissue-specific factors an signals from remote sites with an organism. These signals can take the form of proteins, cytokines, hormones, peptides, enzymes, metabolites or small signaling molecules. The target cells express receptors specific to these signaling molecules and these receptors are critical for the appropriate reception and integration of these signals. Diseases such as cancer are often characterized by aberrant signaling and some signals have been shown to stimulate proliferation and differentiation of the malignant cells. The Epidermal Growth Factor, or EGF is a peptide cytokine that plays a variety of roles in the body including a role as a proliferation factor for cells bearing the EGF receptor or receptors capable of binding EGF. Inappropriate signaling through EGF receptors has been implicated in a number of tumors including breast cancer, squamous cell cancer of the head and neck, pancreatic cancer and glioblastoma. In the case of glioblastoma, patients often exhibit a rearrangement of the gene encoding the EGF receptor in tumor tissue. The rearrangement is typically associated with a dramatic over-expression of this growth factor receptor on the cancerous cells. This differential expression of EGF receptor on tumor cells makes it possible to direct an EGF diphtheria toxin protein fusion toxin to these cancerous cells and selectively ablate them from the patient. (Shaw, et al., Jour. Biol. Chem., 266:21118-21124 (1991)) EGF signaling has also been implicated in the establishment of new blood vessel formation are process known as angiogenesis. Angiogenesis is important in the development of a number of tumors and thus, DTEGF fusion toxin could be employed to prevent angiogeneisis in solid tumors and reduce its size or prevent its development. Thus a VLS-modified DTEGF would have clinical utility and could be used to treat a number of diseases characterized by aberrant EGF receptor expression.

[0084] In addition there are circumstances in which normally appropriate EGF signaling is undesirable and the use of a DTEGF fusion toxin under these circumstance could be clinically useful. For example, as described by Pickering et al “smooth muscle cell proliferation in arteries is a common event after balloon angioplasty and bypass surgery and it is associated with vascular narrowing”. DTEGF can be utilized to prevent smooth muscle cell proliferation and it can be locally applied to prevent vascular narrowing. (Pickering et al., J Clin Invest 91(2):724-9 (1993)).

[0085] To determine if the modified VLS DT-based toxophore described above could be employed to create viable, active fusion toxins, VLS-modified DT387linkerEGF fusion toxins were created and tested. Plasmids encoding VLS-modified toxophores were used as starting vectors and an in-frame insertion of the nucleotide sequence encoding EGF was inserted to create VLS-modified DTE387linkerEGF fusion proteins.

[0086] The fusion proteins were expressed essentially as described above. Induction of mutant DT387linker EGF fusion protein expression was obtained by addition of isopropylthiogalactosidase (ITPG) to E. coli HMS 174 (DE3). E. coli HMS174 is a protease-deficient strain in which over-expression of recombinant proteins can be achieved. Following incubation, the bacterial cells were harvested by centrifugation, the DTEGF bacterial pellets were homogenized in 20 ml, ice cold, STET buffer (50 mM Tris-Cl, pH 8.0, 10 mM EDTA, 8% glucose, 5% Triton X-100). Lysozyme was added to 25 μg/ml and the bacteria were incubated on ice for 1 hour. The preparation was homogenized and then subjected to centrifugation at 6000×g for 30 minutes to 4° C. The resulting pellet was resuspended in 20 ml of STET and homogenized and the centrifugation step repeated. The final pellet was resuspended in 5 ml 7M GuHCl, 50 mM Tris-Cl, pH 8.0, homogenized and centrifuged, 6000×g, 30 minutes, 4° C. The supernatant was used in refolding assays.

[0087] The supernatant protein concentration was 5 mg/ml and refolding was performed at final concentrations of 0.4 mg/ml and 0.08 mg/ml. Refolding was assessed using a Pro-Matrix protein refolding kit from Pierce. (Pierce Biotechnology Inc., Rockford, Ill.) The refolding conditions are shown in Table 3.

TABLE 3
Folding conditions in Pierce Pro-Matric refolding kit used to determine
optimal refolding conditions for VLS-modified DT387linker
EGF fusion proteins produced in E. coli.

| | GuHC1 | L-Arginine | GSG | GSSG |
|---|---|---|---|---|
| Tubes | (M) | (M) | (mM) | (mM) |
| 1 + 10 | 0 | 0 | 2 | 0.2 |
| 2 + 11 | 0 | 0.4 | 2 | 0.4 |
| 3 + 12 | 0 | 0.8 | 1 | 1 |
| 4 + 13 | 0.5 | 0 | 2 | 0.4 |
| 5 + 14 | 0.5 | 0.4 | 1 | 1 |
| 6 + 15 | 0.5 | 0.8 | 2 | 0.2 |
| 7 + 16 | 1.0 | 0 | 1 | 1 |
| 8 + 17 | 1.0 | 0.4 | 2 | 0.2 |
| 9 + 18 | 1.0 | 0.8 | 2 | 0.4 |

[0088] Tubes 1-9 had a final concentration of 1.6×10⁻⁶ M and tubes 10-18 had a final concentration of 8×10⁻⁶ M DT387 (D8EV29A)linker EGF. The tubes were incubated overnight at 4° C. and 1 μl volumes were assayed the next day for cytotoxicity on U87MG glioblastoma cells (Glioblastoma cells have been shown to express EGF receptors ((Frankel et al., Clin Cancer Res., 8(5):1004-13 (2002)). The samples were also analyzed by gel electrophoresis to assure no degradation had occurred during refolding (FIG. 8).

[0089] Samples of VLS-modified fusion toxins (shown here VLS-modified DT387(D8EV29S)linker EGF and DT387EGF were purified through the inclusion body step, denatured and subjected to refolding under a variety of conditions. Samples were then dialysed to remove any residual contaminants from the refolding conditions and tested for activity in cytotoxicity assays against U87MG EGF-receptor-bearing cells. These preparations are still considered crude and were used only to compare conditions which resulted in enhanced activity relative to standard refolding conditions and fusion toxins created using the native DT toxophore [in the context of an EGF fusion toxin DTEGF]. FIG. 9 shows the results for cytotoxicity assays of samples 1-9, using protein concentration of DT387(D8EV29A)linker EGF of 8×10⁻⁹ M. FIG. 10 depicts the results for tubes 10-18 in which the protein concentration of DT387(D8EV29A)linker EGF employed were higher (4×10⁻⁸ M). Refolding to an actively cytotoxic form was more efficient when the lower concentrations of DT387(D8EV29A)linker EGF fusion toxin were employed. Buffer conditions 4, 6 and 8 were chosen for further refinement.

[0090] New preparations of DT387EGF and DT387(D8EV29A)linker EGF were prepared as described above. The final, denatured supernatants were refolded in buffers 4, 6 or 8, (see Table 3), at lower protein concentrations. After refolding, the samples were dialyzed against corresponding refolding buffers, without GuHCl, permitting higher concentrations of fusion toxin to be tested. The results indicate that the IC₅₀₅ for DT387EGF ranged from 8×10⁻¹⁰ M to 1.5×10⁻⁹ M for the buffers tested. Buffer 8 appeared to yield the most productive protein. The same holds true for refolding of the DT387(D8EV29A)linker EGF mutant.

[0091] Other VLS-modified DT387EGF fusion proteins were also tested for their cytotoxicity in EGF-receptor-positive U87MG glioblastoma cells. As shown in FIG. 11, the EGF fusion toxins created with VLS modifications that exhibit the greatest selective toxicity against EGF-receptor-bearing cell are DT387(V7SV29A)linker EGF, DT387(D291E)linker EGF, DT387(V29A)linker EGF. These EGF fusion toxins display IC 50s comparable to cGMP prepared DT387linker EGF and DT 387linker EGF prepared under conditions identical to those used to express, refold and purify the VLS-modified DT387linker EGF fusion toxins. Thus, the VLS modified DT-based toxophores can be employed to create novel DT-based fusion toxins.

[0092] FIG. 12 is a Coomassie stained SDS-PAGE gel showing the level of purity for the VLS-modified DT387linker EGF fusion protein tested in FIG. 11. Several additional species are apparent on the gel and the variation of expression levels can be observed. Resolution of these species by both anion exchange chromatography and sizing yielded fusion preparations that were homogenous and exhibited higher specific toxicity. This presumably was a function of the relatively purity of the active species versus the total protein concentration used to determine IC₅₀s.

### EXAMPLE 5

### VLS Mutants Suitable for DT-Fusion Protein—VLS Modified DTIL-2

[0093] 1 (a) Cytoxocity Assays on Crude Extracts of DT387linker IL-2 VLS Mutants.

[0094] The DT387 construct was initially used to demonstrate that VLS-modified toxophores could be chemically coupled to a number of targeting ligands and yield functional targeted toxins. The large-scale production of targeted toxins following chemical conjugation, however, was not a commercially viable enterprise and the advent of single chain fusions toxins as exemplified by DT387linker IL-2 circumvents the scale-up purification problems typically encountered in the development of conjugate toxins. Fusion toxins, however, do present challenges in that the single chain molecules must be purified into an active, appropriately folded form capable of effective delivery of the catalytic domain of the toxin to targeted cells. Thus, the site-directed changes in VLS modified DT387 and DT387linker IL-2 might not yield functional molecules or molecules that can be readily refolded into active fusion toxins. To confirm the effects of the engineered changes, a number of VLS modified DT387 IL-2 fusion toxins were produced and tested in cytotoxicity assays.

[0095] Conservative amino acid substitutions in the C and T domains of DT have been created. To determine that the changes do not yield inactive toxophores incapable of producing fusion toxins, cytotoxicity assays were performed. Readily apparent patterns have emerged which dictate the type of amino acid substitutions that can be accepted at each of the three VLS motifs within DT. Results indicate that mutations of the VLS sequences present at amino acid residues 7-9 or 290-292 of the DT toxophore resulted in less binding to human umbilical vein cell monolayers in culture. Some constructs demonstrated low levels of expression. Consequently additional VLS mutants were developed including: V7S, D8E, D8S and D291E.

[0096] The cytotoxicities of crude extracts of wild type DAB₃₈₉IL-2, two of the VLS mutants and a control were assayed as indicated. The results are reported as a percentage of control incorporation (no toxin added to cells).

[0097] These mutants were incorporated alone or in combination (D8S, V29A and V7A, V29A, 1290A variants) into DT387linker IL-2 and have been tested as partially purified extracts in cytotoxicity assays and results indicate they are cytotoxic when compared to the negative control, DAB389linker EGF control, (which contains a targeting ligand to a receptor not expressed on HUT102/6TG cells) and DAB389linker IL-2. All VLS modified mutant toxophore fusion toxins were compared to DAB389linker IL-2 produced and tested at similar levels of purity and concentration. The triple mutant, DT387(V7A,V29A,D291E)linker IL-2 was expressed in full-length form, despite the valine to alanine change at position 7, and was also cytotoxic. FIG. 13 shows the representative results of a cytotoxicity assay using DT387linker IL-2, DT387(D8SV29A)linker IL-2, DT387, DT387(V7AV29A)linker IL2, DT387(V7AV29AI290A)linker IL2, DT387(V7SV29A)Iinker IL2, and DT387(D8EV29A)linker IL2.

[0098] Cytotoxicity assays are performed using HUT102/6TG cells, a human HTLV1 transformed T-cell line that expresses high affinity Interleukin-2 receptors. HUT102/6TG cells are maintained in RPMI 1640 (Gibco) media supplemented with 10% fetal bovine serum, 2 mM glutamine, 50 IU/ml penicillin and 50 μg/ml streptomycin. The cells are seeded at a density of 5×10⁴/well into 96 well, V-microtiter plates. The fusion protein toxins are typically added to the wells in molarities ranging from 10⁻⁷ M down to 10⁻¹² M. Final volume in the wells is 200 μl. The plates are incubated for 18 hours, at 37° C. in a 5% CO₂ environment. The plates are subjected to centrifugation to pellet the cells, the media removed and replaced with 200 μl leucine-free, minimal essential medium containing 1.0 μCi/ml[¹⁴C] leucine (<280 mCi/mmol, Amersham-Pharmacia) and 21 mM glutamine, 50 IU/ml penicillin and 50 μg/ml streptomycin. The cells are pulsed for 90 minutes and then the plates subjected to centrifugation to pellet the cells. The supernatant is removed and the cells are lysed in 60 μl, 0.4 M KOH followed by a 10 minute incubation at room temperature. 140 μl of 10% TCA is then added to each well and another 10 minute, room temperature incubation is performed. The precipitated proteins are collected on glass fiber filters using a “PHD cell harvester” and the incorporated radioactivity is determined using standard methods. The results are reported as a percentage of control (no fusion protein added to inhibit protein synthesis) [¹⁴C]-leucine incorporation.

[0099] Pharmaceutical grade GMP purified DAB₃₈₉IL-2 produced from E. Coli typically yields an IC₅₀ of between 5×10⁻¹¹ M to 1×10⁻¹² M. Partially purified toxins exhibit activity between 10-100 fold lower in partially purified non-homogenous extracts. Pharmaceutical grade toxins are purified to homogeneity and the active fractions of refolded fusion toxins are used as biologically active drug. In the example above we utilize a moderate through put analysis to determine the receptor specific cytotoxicity of partially purified VLS modified DT-IL-2 fusion toxins and compared them to the activity of similarly purified DAB₃₈₉IL-2. These assays demonstrate comparable activity of the VLS modified DT387linker IL-2 fusion to DAB₃₈₉IL-2. It should be noted that the calculation of specific cytotoxicity was based upon the total amount of protein in the samples of partially fusion toxin. For assays equimolar concentrations of fusion toxins were tested. As shown below in panel FIG. 14 panels A and B each fusion toxins construct displayed patterns on 10% SDS PAGE and Western (anti diphtheria toxin) analysis. In FIG. 14, A is coomassie stained gel of partially purified inclusion body preparations. Lane 1, molecular weight markers; lane 2, DAB₃₈₉IL-2; lane 3, DT387(V7AV29A)linker IL-2, lane 4, DT387(V7S,V29A)linker IL-2, lane 5, DT387(D8E,V29A) linker IL-2; lane 6, DT387(D8S,V29A) linker IL-2; lane 7, DT387(V7A,V29A,D291E) linker IL-2. B is corresponding Western blot with horse anti-DT first antibody and rabbit anti-horse secondary antibody. The relative amounts of non-fusion toxins protein in each sample could artificially alter the IC₅₀ of any given construct. That is, the presence of non full length or non fusion toxin protein in the samples used in this analysis could potentially account for small differences in IC₅₀.

[0100] The cytotoxicity data clearly demonstrate that the modifications that reduce HUVEC binding can be employed to create functional DTIL-2 fusion toxins.

[0101] Purified DAB₃₈₉ IL-2 produced in E. coli typically yields an IC₅₀ of between 5×10⁻¹¹ M to 1×10⁻¹² M. In the example above, a moderate through put cytotoxicity assay was used to analyze crude purifications of VLS modified DT-IL-2 fusion toxins and compared them to the activity of similarly purified DT387linkerIL-2. Insert figure for comparison of relative purity of IL2 fusion toxins in this assay.

[0102] It should be noted that there is one (x)D(y) motif in IL-2 located at residues 19-21 (LDL). The contribution of IL-2 to VLS can be determined by modifying the (x)D(y) motif in the IL-2 and test the modified protein using the cytotoxicity assay described above. [For example, using VLS-modified DT mutants derived from both DT387 and DT387linker IL-2, it is possible to distinguish between effects of the VLS mutations on catalytic activity, VLS activity and effective delivery of the targeted toxin to the cytosol of target cells]. The comparison between VLS-modified DT mutants of DT387 and DT387linker IL2 will also separate the effects of VLS sequences of the toxophore alone from the IL-2 targeting ligand present in DT387linker IL-2.

[0103] Table 4 summarizes the IC_{50S} of VLS-modified DT mutants. Mutants not tested are indicated by “n.t.” Primary screening of mutants was performed following expression and crude primary inclusion body purification. Complete purification was not performed and the VLS modified toxophores have all been tested in the context of at least one fusion toxin (EGF receptor or IL-2 receptor targeted) and compared to DT387 based parental fusion toxin expressed and prepared to a similar level of purification.

TABLE 4
IC_{50S} of VLS-modified DT mutants

| SINGLE | DOUBLE | TRIPLE |
|---|---|---|
| MUTANT | MUTANT | MUTANT |
| DT387 (V7A) >10⁻⁷ | DT387 (V7A, V29A) >10⁻⁷ | DT387 (V7A, V29A, D291E) >10⁻⁷ |
| DT387 (D8S) 2 × 10⁻⁸ | DT387 (V7S, V29A) 2 × 10⁻⁸ | |
| DT387 (ΔD8) >10⁻⁷ | DT387 (D8S, V29A) 2.5 × 10⁻¹⁰ | |
| DT387 (V29A) 2 × 10⁻¹⁰ | DT387 (D8S, D291S) n.t. | |
| | DT387 (D8E, V29A) 5 × 10⁻⁹ | |
| | DT387 (V29A, D291E) 2 × 10⁻⁹ | |

[0104] The IC50S were determined in the cytotoxicity assay as described in Examples 4 and 5, IC_{50S} for DT387linker EGF and DT387linker IL-2 were found to be in a similar range from 5×10⁻⁹ to 1×10⁻¹⁰ M. The cytotoxicity of both the parental DAB389-based fusion toxins and VLS-modified DT387 fusion toxins increased with increasing levels of purification. For example, pharmaceutical grade DAB389EGF exhibits an lC₅₀ of 4.5×10⁻¹¹ M in these assays whereas crude inclusion body preparations of DT387(V29A)linker EGF exhibit an IC₅₀ of 2×10⁻¹⁰ M.

[0105] Among the VLS-modified DT387 toxophore constructs tested thus far, DT387(V29A) and DT387(D8S, V29A) appear to maintain cytotoxicity comparable to wild type. The DT387(D8S) single mutant was not as cytotoxic as the corresponding double mutant indicating the additional change to V29A helped stabilize the molecule.

[0106] The preferred embodiments of the compounds and methods of the present invention are intended to be illustrative and not limiting. Modifications and variations can be made by persons skilled in the art in light of the above teachings specifically those that may pertain to alterations in the DT toxophore surrounding the described VLS sequences that could result in reduced HUVEC binding while maintaining near native fumctionally with respect to the ability to use as a DT toxophore in protein fusion toxin constructions. It is also conceivable to one skilled in the art that the present invention can be used for other purposes, including, for example, the delivery of other novel molecules to a selected cell population. It is envisioned that the present invention would be employed under those circumstances in which amounts of DT toxophore would be used to deliver such agents in a clinical setting or in settings where it would be desirable to reduce as much as possible the potential for VLS. In this setting the catalytic domain or some portion thereof would be replaced, ro rendered inactive and fused with the desired agent or molecule. Acid sensitive or protease sensitive cleavage sites could be inserted between the remnant of the catalytic domain and the desired agent or molecule. Agents or molecules that might be coupled to VLS modified DT toxophore such as disclosed herein include but are not limited to; peptides or protein fragments, nucleic acids, ogligonucleotides, acid insensitive proteins, glycoproteins, proteins or novel chemical entities that required selective delivery. Therefore, it should be understood that changes may be made in the particular embodiments disclosed which are within the scope of what is described as defined by the appended claims.

The application's sequence listing, which the Patent Office published only in electronic form, follows.

SEQUENCE LISTING (141 sequences)

SEQ ID NO: 1 - protein, 536 aa, Corynephage omega
AGADDVVDSSKSFVMENFSSYHGTKPGYVDSIQKGIQKPKSGTQGNYDDDWKGFYSTDNKYDAAGYSVDNENPLSGKAGGVVKVTYPGLTKVLALKVDNAETIKKELGLSLTEPLMEQVGTEEFIKRFGDGASRVVLSLPFAEGSSSVEYINNWEQAKALSVELEINFETRGKRGQDAMYEYMAQACAGNRVRRSVGSSLSCINLDWDVIRDKTKTKIESLKEHGPIKNKMSESPNKTVSEEKAKQYLEEFHQTALEHPELSELKTVTGTNPVFAGANYAAWAVNVAQVIDSETADNLEKTTAALSILPGIGSVMGIADGAVHHNTEEIVAQSIALSSLMVAQAIPLVGELVDIGFAAYNFVESIINLFQVVHNSYNRPAYSPGHKTQPFLHDGYAVSWNTVEDSIIRTGFQGESGHDIKITAENTPLPIAGVLLPTIPGKLDVNKSKTHISVNGRKIRMRCRAIDGDVTFCRPKSPVYVGNGVHANLHVAFHRSSSEKIHSNEISSDSIGVLGYQKTVDHTKVNSKLSLFFEIKS

SEQ ID NO: 2 - protein, 387 aa, Artificial Sequence
  Corynephage omega: Trucked Native DT sequence
AGADDVVDSSKSFVMENFSSYHGTKPGYVDSIQKGIQKPKSGTQGNYDDDWKGFYSTDNKYDAAGYSVDNENPLSGKAGGVVKVTYPGLTKVLALKVDNAETIKKELGLSLTEPLMEQVGTEEFIKRFGDGASRVVLSLPFAEGSSSVEYINNWEQAKALSVELEINFETRGKRGQDAMYEYMAQACAGNRVRRSVGSSLSCINLDWDVIRDKTKTKIESLKEHGPIKNKMSESPNKTVSEEKAKQYLEEFHQTALEHPELSELKTVTGTNPVFAGANYAAWAVNVAQVIDSETADNLEKTTAALSILPGIGSVMGIADGAVHHNTEEIVAQSIALSSLMVAQAIPLVGELVDIGFAAYNFVESIINLFQVVHNSYNRPAYSPGHKT

SEQ ID NO: 3 - DNA, 1140 bp, Artificial sequence
  Corynephage omega: DT380
  CDS (1)..(1140)
atgggcgctgatgatgttgttgattcttctaaatcttttgtgatggaaaacttttcttcgtaccacgggactaaacctggttatgtagattccattcaaaaaggtatacaaaagccaaaatctggtacacaaggaaattatgacgatgattggaaagggttttatagtaccgacaataaatacgacgctgcgggatactctgtagataatgaaaacccgctctctggaaaagctggaggcgtggtcaaagtgacgtatccaggactgacgaaggttctcgcactaaaagtggataatgccgaaactattaagaaagagttaggtttaagtctcactgaaccgttgatggagcaagtcggaacggaagagtttatcaaaaggttcggtgatggtgcttcgcgtgtagtgctcagccttcccttcgctgaggggagttctagcgttgaatatattaataactgggaacaggcgaaagcgttaagcgtagaacttgagattaattttgaaacccgtggaaaacgtggccaagatgcgatgtatgagtatatggctcaagcctgtgcaggaaatcgtgtcaggcgatcagtaggtagctcattgtcatgcatcaacctggattgggatgttatccgtgataaaactaaaactaagatcgaatctctgaaagaacacggtccgatcaaaaacaaaatgagcgaaagcccgaacaaaactgtatctgaagaaaaagctaaacagtacctggaagaattccaccagactgcactggaacacccggaactgtctgaacttaagaccgttactggtaccaacccggtattcgctggtgctaactacgctgcttgggcagtaaacgttgctcaggttatcgatagcgaaactgctgataacctggaaaaaactaccgcggctctgtctatcctgccgggtatcggtagcgtaatgggcatcgcagacggcgccgttcaccacaacactgaagaaatcgttgcacagtctatcgctctgagctctctgatggttgctcaggccatcccgctggtaggtgaactggttgatatcggtttcgctgcatacaacttcgttgaaagcatcatcaacctgttccaggttgttcacaactcttacaaccgcccggct

SEQ ID NO: 4 - protein, 380 aa, Artificial sequence
  Corynephage omega: DT380
MGADDVVDSSKSFVMENFSSYHGTKPGYVDSIQKGIQKPKSGTQGNYDDDWKGFYSTDNKYDAAGYSVDNENPLSGKAGGVVKVTYPGLTKVLALKVDNAETIKKELGLSLTEPLMEQVGTEEFIKRFGDGASRVVLSLPFAEGSSSVEYINNWEQAKALSVELEINFETRGKRGQDAMYEYMAQACAGNRVRRSVGSSLSCINLDWDVIRDKTKTKIESLKEHGPIKNKMSESPNKTVSEEKAKQYLEEFHQTALEHPELSELKTVTGTNPVFAGANYAAWAVNVAQVIDSETADNLEKTTAALSILPGIGSVMGIADGAVHHNTEEIVAQSIALSSLMVAQAIPLVGELVDIGFAAYNFVESIINLFQVVHNSYNRPA

SEQ ID NO: 5 - DNA, 1167 bp, Artificial sequence
  Corynephage omega: DT387/DAB389
  CDS (1)..(1167)
atgggcgctgatgatgttgttgattcttctaaatcttttgtgatggaaaacttttcttcgtaccacgggactaaacctggttatgtagattccattcaaaaaggtatacaaaagccaaaatctggtacacaaggaaattatgacgatgattggaaagggttttatagtaccgacaataaatacgacgctgcgggatactctgtagataatgaaaacccgctctctggaaaagctggaggcgtggtcaaagtgacgtatccaggactgacgaaggttctcgcactaaaagtggataatgccgaaactattaagaaagagttaggtttaagtctcactgaaccgttgatggagcaagtcggaacggaagagtttatcaaaaggttcggtgatggtgcttcgcgtgtagtgctcagccttcccttcgctgaggggagttctagcgttgaatatattaataactgggaacaggcgaaagcgttaagcgtagaacttgagattaattttgaaacccgtggaaaacgtggccaagatgcgatgtatgagtatatggctcaagcctgtgcaggaaatcgtgtcaggcgatcagtaggtagctcattgtcatgcatcaacctggattgggatgttatccgtgataaaactaaaactaagatcgaatctctgaaagaacacggtccgatcaaaaacaaaatgagcgaaagcccgaacaaaactgtatctgaagaaaaagctaaacagtacctggaagaattccaccagactgcactggaacacccggaactgtctgaacttaagaccgttactggtaccaacccggtattcgctggtgctaactacgctgcttgggcagtaaacgttgctcaggttatcgatagcgaaactgctgataacctggaaaaaactaccgcggctctgtctatcctgccgggtatcggtagcgtaatgggcatcgcagacggcgccgttcaccacaacactgaagaaatcgttgcacagtctatcgctctgagctctctgatggttgctcaggccatcccgctggtaggtgaactggttgatatcggtttcgctgcatacaacttcgttgaaagcatcatcaacctgttccaggttgttcacaactcttacaaccgcccggcttactctccgggtcacaagacgcatgca

SEQ ID NO: 6 - protein, 389 aa, Artificial sequence
  Corynephage omega: DT387/DAB389
MGADDVVDSSKSFVMENFSSYHGTKPGYVDSIQKGIQKPKSGTQGNYDDDWKGFYSTDNKYDAAGYSVDNENPLSGKAGGVVKVTYPGLTKVLALKVDNAETIKKELGLSLTEPLMEQVGTEEFIKRFGDGASRVVLSLPFAEGSSSVEYINNWEQAKALSVELEINFETRGKRGQDAMYEYMAQACAGNRVRRSVGSSLSCINLDWDVIRDKTKTKIESLKEHGPIKNKMSESPNKTVSEEKAKQYLEEFHQTALEHPELSELKTVTGTNPVFAGANYAAWAVNVAQVIDSETADNLEKTTAALSILPGIGSVMGIADGAVHHNTEEIVAQSIALSSLMVAQAIPLVGELVDIGFAAYNFVESIINLFQVVHNSYNRPAYSPGHKTHA

SEQ ID NO: 7 - DNA, 1365 bp, Artificial sequence
  Corynephage omega: DT387/DAB389 Linker
  CDS (1)..(1215)
atgggcgctgatgatgttgttgattcttctaaatcttttgtgatggaaaacttttcttcgtaccacgggactaaacctggttatgtagattccattcaaaaaggtatacaaaagccaaaatctggtacacaaggaaattatgacgatgattggaaagggttttatagtaccgacaataaatacgacgctgcgggatactctgtagataatgaaaacccgctctctggaaaagctggaggcgtggtcaaagtgacgtatccaggactgacgaaggttctcgcactaaaagtggataatgccgaaactattaagaaagagttaggtttaagtctcactgaaccgttgatggagcaagtcggaacggaagagtttatcaaaaggttcggtgatggtgcttcgcgtgtagtgctcagccttcccttcgctgaggggagttctagcgttgaatatattaataactgggaacaggcgaaagcgttaagcgtagaacttgagattaattttgaaacccgtggaaaacgtggccaagatgcgatgtatgagtatatggctcaagcctgtgcaggaaatcgtgtcaggcgatcagtaggtagctcattgtcatgcatcaacctggattgggatgttatccgtgataaaactaaaactaagatcgaatctctgaaagaacacggtccgatcaaaaacaaaatgagcgaaagcccgaacaaaactgtatctgaagaaaaagctaaacagtacctggaagaattccaccagactgcactggaacacccggaactgtctgaacttaagaccgttactggtaccaacccggtattcgctggtgctaactacgctgcttgggcagtaaacgttgctcaggttatcgatagcgaaactgctgataacctggaaaaaactaccgcggctctgtctatcctgccgggtatcggtagcgtaatgggcatcgcagacggcgccgttcaccacaacactgaagaaatcgttgcacagtctatcgctctgagctctctgatggttgctcaggccatcccgctggtaggtgaactggttgatatcggtttcgctgcatacaacttcgttgaaagcatcatcaacctgttccaggttgttcacaactcttacaaccgcccggcttactctccgggtcacaagacgcatgcatctagcggaggtggctctagcggtggaggatccgcacctacttctagctctaccaagaaaacccagctgcagctcgagcacctgctgctggatttccagatgatcctgaacggtatcaacaattacaagaacccgaaactgacgcgtatgctgaccttcaagttctacatgccgaagaaggccaccgaactgaaacac

SEQ ID NO: 8 - protein, 405 aa, Artificial sequence
  Corynephage omega: DT387/DAB389 Linker
MGADDVVDSSKSFVMENFSSYHGTKPGYVDSIQKGIQKPKSGTQGNYDDDWKGFYSTDNKYDAAGYSVDNENPLSGKAGGVVKVTYPGLTKVLALKVDNAETIKKELGLSLTEPLMEQVGTEEFIKRFGDGASRVVLSLPFAEGSSSVEYINNWEQAKALSVELEINFETRGKRGQDAMYEYMAQACAGNRVRRSVGSSLSCINLDWDVIRDKTKTKIESLKEHGPIKNKMSESPNKTVSEEKAKQYLEEFHQTALEHPELSELKTVTGTNPVFAGANYAAWAVNVAQVIDSETADNLEKTTAALSILPGIGSVMGIADGAVHHNTEEIVAQSIALSSLMVAQAIPLVGELVDIGFAAYNFVESIINLFQVVHNSYNRPAYSPGHKTHASSGGGSSGGGSAPTSS

SEQ ID NO: 9 - DNA, 1173 bp, Artificial sequence
  Corynephage omega: DT380 linker
  CDS (1)..(1173)
atgggcgctgatgatgttgttgattcttctaaatcttttgtgatggaaaacttttcttcgtaccacgggactaaacctggttatgtagattccattcaaaaaggtatacaaaagccaaaatctggtacacaaggaaattatgacgatgattggaaagggttttatagtaccgacaataaatacgacgctgcgggatactctgtagataatgaaaacccgctctctggaaaagctggaggcgtggtcaaagtgacgtatccaggactgacgaaggttctcgcactaaaagtggataatgccgaaactattaagaaagagttaggtttaagtctcactgaaccgttgatggagcaagtcggaacggaagagtttatcaaaaggttcggtgatggtgcttcgcgtgtagtgctcagccttcccttcgctgaggggagttctagcgttgaatatattaataactgggaacaggcgaaagcgttaagcgtagaacttgagattaattttgaaacccgtggaaaacgtggccaagatgcgatgtatgagtatatggctcaagcctgtgcaggaaatcgtgtcaggcgatcagtaggtagctcattgtcatgcatcaacctggattgggatgttatccgtgataaaactaaaactaagatcgaatctctgaaagaacacggtccgatcaaaaacaaaatgagcgaaagcccgaacaaaactgtatctgaagaaaaagctaaacagtacctggaagaattccaccagactgcactggaacacccggaactgtctgaacttaagaccgttactggtaccaacccggtattcgctggtgctaactacgctgcttgggcagtaaacgttgctcaggttatcgatagcgaaactgctgataacctggaaaaaactaccgcggctctgtctatcctgccgggtatcggtagcgtaatgggcatcgcagacggcgccgttcaccacaacactgaagaaatcgttgcacagtctatcgctctgagctctctgatggttgctcaggccatcccgctggtaggtgaactggttgatatcggtttcgctgcatacaacttcgttgaaagcatcatcaacctgttccaggttgttcacaactcttacaaccgcccggcttctagcggaggtggctctagcggtggaggatcc

SEQ ID NO: 10 - protein, 391 aa, Artificial sequence
  Corynephage omega: DT380 linker
MGADDVVDSSKSFVMENFSSYHGTKPGYVDSIQKGIQKPKSGTQGNYDDDWKGFYSTDNKYDAAGYSVDNENPLSGKAGGVVKVTYPGLTKVLALKVDNAETIKKELGLSLTEPLMEQVGTEEFIKRFGDGASRVVLSLPFAEGSSSVEYINNWEQAKALSVELEINFETRGKRGQDAMYEYMAQACAGNRVRRSVGSSLSCINLDWDVIRDKTKTKIESLKEHGPIKNKMSESPNKTVSEEKAKQYLEEFHQTALEHPELSELKTVTGTNPVFAGANYAAWAVNVAQVIDSETADNLEKTTAALSILPGIGSVMGIADGAVHHNTEEIVAQSIALSSLMVAQAIPLVGELVDIGFAAYNFVESIINLFQVVHNSYNRPASSGGGSSGGGS

SEQ ID NO: 11 - DNA, 1326 bp, Artificial sequence
  Corynephage omega: DT387EGF/DAB389EGF
  CDS (1)..(1326)
atgggcgctgatgatgttgttgattcttctaaatcttttgtgatggaaaacttttcttcgtaccacgggactaaacctggttatgtagattccattcaaaaaggtatacaaaagccaaaatctggtacacaaggaaattatgacgatgattggaaagggttttatagtaccgacaataaatacgacgctgcgggatactctgtagataatgaaaacccgctctctggaaaagctggaggcgtggtcaaagtgacgtatccaggactgacgaaggttctcgcactaaaagtggataatgccgaaactattaagaaagagttaggtttaagtctcactgaaccgttgatggagcaagtcggaacggaagagtttatcaaaaggttcggtgatggtgcttcgcgtgtagtgctcagccttcccttcgctgaggggagttctagcgttgaatatattaataactgggaacaggcgaaagcgttaagcgtagaacttgagattaattttgaaacccgtggaaaacgtggccaagatgcgatgtatgagtatatggctcaagcctgtgcaggaaatcgtgtcaggcgatcagtaggtagctcattgtcatgcatcaacctggattgggatgttatccgtgataaaactaaaactaagatcgaatctctgaaagaacacggtccgatcaaaaacaaaatgagcgaaagcccgaacaaaactgtatctgaagaaaaagctaaacagtacctggaagaattccaccagactgcactggaacacccggaactgtctgaacttaagaccgttactggtaccaacccggtattcgctggtgctaactacgctgcttgggcagtaaacgttgctcaggttatcgatagcgaaactgctgataacctggaaaaaactaccgcggctctgtctatcctgccgggtatcggtagcgtaatgggcatcgcagacggcgccgttcaccacaacactgaagaaatcgttgcacagtctatcgctctgagctctctgatggttgctcaggccatcccgctggtaggtgaactggttgatatcggtttcgctgcatacaacttcgttgaaagcatcatcaacctgttccaggttgttcacaactcttacaaccgcccggcttactctccgggtcacaagacgcatgcaaacagcgatagcgaatgcccgctgagccatgatggctattgcctgcatgatggcgtgtgcatgtatattgaagcgctggataaatatgcgtgcaactgcgtggtgggctatattggcgaacgctgccagtatcgcgatctgaaatggtgggaactgcgc

SEQ ID NO: 12 - protein, 442 aa, Artificial sequence
  Corynephage omega: DT387EGF/DAB389EGF
MGADDVVDSSKSFVMENFSSYHGTKPGYVDSIQKGIQKPKSGTQGNYDDDWKGFYSTDNKYDAAGYSVDNENPLSGKAGGVVKVTYPGLTKVLALKVDNAETIKKELGLSLTEPLMEQVGTEEFIKRFGDGASRVVLSLPFAEGSSSVEYINNWEQAKALSVELEINFETRGKRGQDAMYEYMAQACAGNRVRRSVGSSLSCINLDWDVIRDKTKTKIESLKEHGPIKNKMSESPNKTVSEEKAKQYLEEFHQTALEHPELSELKTVTGTNPVFAGANYAAWAVNVAQVIDSETADNLEKTTAALSILPGIGSVMGIADGAVHHNTEEIVAQSIALSSLMVAQAIPLVGELVDIGFAAYNFVESIINLFQVVHNSYNRPAYSPGHKTHANSDSECPLSHDGYCLHDGVCMYIEALDKYACNCVVGYIGERCQYRDLKWWELR

SEQ ID NO: 13 - DNA, 1359 bp, Artificial sequence
  Corynephage omega: DT387 linker EGF/DAB389 linker EGF
  CDS (1)..(1359)
atgggcgctgatgatgttgttgattcttctaaatcttttgtgatggaaaacttttcttcgtaccacgggactaaacctggttatgtagattccattcaaaaaggtatacaaaagccaaaatctggtacacaaggaaattatgacgatgattggaaagggttttatagtaccgacaataaatacgacgctgcgggatactctgtagataatgaaaacccgctctctggaaaagctggaggcgtggtcaaagtgacgtatccaggactcacgaaggttctcgcactaaaagtggataatgccgaaactattaagaaagagttaggtttaagtctcactgaaccgttgatggagcaagtcggaacggaagagtttatcaaaaggttcggtgatggtgcttcgcgtgtagtgctcagccttcccttcgctgaggggagttctagcgttgaatatattaataactgggaacaggcgaaagcgttaagcgtagaacttgagattaattttgaaacccgtggaaaacgtggccaagatgcgatgtatgagtatatggctcaagcctgtgcaggaaatcgtgtcaggcgatcagtaggtagctcattgtcatgcatcaacctggattgggatgttatccgtgataaaactaaaactaagatcgaatctctgaaagaacacggtccgatcaaaaacaaaatgagcgaaagcccgaacaaaactgtatctgaagaaaaagctaaacagtacctggaagaattccaccagactgcactggaacacccggaactgtctgaacttaagaccgttactggtaccaccccggtattcgctggtgctaactacgctgcttgggcagtaaacgttgctcaggttatcgatagcgaaactgctgataacctggaaaaaactaccgcggctctgtctatcctgccgggtatcggtagcgtaatgggcatcgcagacggcgccgttcaccacaacactgaagaaatcgttgcacagtctatcgctctgagctctctgatggttgctcaggccatcccgctggtaggtgaactggttgatatcggtttcgctgcatacaacttcgttgaaagcatcatcaacctgttccaggttgttcacaactcttacaaccgcccggcttactctccgggtcacaagacgcatgcatctagcggaggtggctctagcggtggaggatccaacagcgatagcgaatgcccgctgagccatgatggctattgcctgcatgatggcgtgtgcatgtatattgaagcgctggataaatatgcgtgcaactgcgtggtgggctatattggcgaacgctgccagtatcgcgatctgaaatggtgggaactgcgc

SEQ ID NO: 14 - protein, 453 aa, Artificial sequence
  Corynephage omega: DT387 linker EGF/DAB389 linker EGF
MGADDVVDSSKSFVMENFSSYHGTKPGYVDSIQKGIQKPKSGTQGNYDDDWKGFYSTDNKYDAAGYSVDNENPLSGKAGGVVKVTYPGLTKVLALKVDNAETIKKELGLSLTEPLMEQVGTEEFIKRFGDGASRVVLSLPFAEGSSSVEYINNWEQAKALSVELEINFETRGKRGQDAMYEYMAQACAGNRVRRSVGSSLSCINLDWDVIRDKTKTKIESLKEHGPIKNKMSESPNKTVSEEKAKQYLEEFHQTALEHPELSELKTVTGTTPVFAGANYAAWAVNVAQVIDSETADNLEKTTAALSILPGIGSVMGIADGAVHHNTEEIVAQSIALSSLMVAQAIPLVGELVDIGFAAYNFVESIINLFQVVHNSYNRPAYSPGHKTHASSGGGSSGGGSNSDSECPLSHDGYCLHDGVCMYIEALDKYACNCVVGYIGERCQYRDLKWWELR

SEQ ID NO: 15 - DNA, 1569 bp, Artificial sequence
  Corynephage omega: DT387IL2/DAB389IL-2
  CDS (1)..(1569)
atgggcgctgatgatgttgttgattcttctaaatcttttgtgatggaaaacttttcttcgtaccacgggactaaacctggttatgtagattccattcaaaaaggtatacaaaagccaaaatctggtacacaaggaaattatgacgatgattggaaagggttttatagtaccgacaataaatacgacgctgcgggatactctgtagataatgaaaacccgctctctggaaaagctggaggcgtggtcaaagtgacgtatccaggactgacgaaggttctcgcactaaaagtggataatgccgaaactattaagaaagagttaggtttaagtctcactgaaccgttgatggagcaagtcggaacggaagagtttatcaaaaggttcggtgatggtgcttcgcgtgtagtgctcagccttcccttcgctgaggggagttctagcgttgaatatattaatacctgggaacaggcgaaagcgttaagcgtagaacttgagattaattttgaaacccgtggaaaacgtggccaagatgcgatgtatgattatatggctcaagcctgtgcaggaaatcgtgtcaggcgatcagtaggtagctcattgtcatgcatcaacctggattgggatgttatccgtgataaaactaaaactaagatcgaatctctgaaagaacacggtccgatcaaaaacaaaatgagcgaaagcccgaacaaaactgtatctgaagaaaaagctaaacagtacctggaagaattccaccagactgcactggaacacccggaactgtctgaacttaagaccgttactggtaccaacccggtattcgctggtgctaactacgctgcttgggcagtaaacgttgctcaggttatcgatagcgaaactgctgataacctggaaaaaactaccgcggctctgtctatcctgccgggtatcggtagcgtaatgggcatcgcagacggcgccgttcaccacaacactgaagaaatcgttgcacagtctatcgctctgagctctctgatggttgctcaggccatcccgctggtaggtgaactggttgatatcggtttcgctgcatacaacttcgttgaaagcatcatcaacctgttccaggttgttcacaactcttacaaccgcccggcttactctccgggtcacaagacgcatgcagcacctacttctagctctaccaagaaaacccagctgcagctcgagcacctgctgctggatttgcagatgatcctgaacggtatcaacaattacaagaacccgaaactgacgcgtatgctgaccttcaagttctacatgccgaagaaggccaccgaactgaaacacctgctgcagtgtctagaagaagaactgaaaccgctggaggaagttctgaacctggctcagtctaaaaacttccacctgcggccgcgtgacctgatctctaacatcaacgtaatcgttctggaactgaagggctctgaaaccaccttcatgtgtgaatacgctgatgagaccgcaaccatcgtagaattcctgaaccgttggatcaccttctgtcagtctatcatctctaccctgacc

SEQ ID NO: 16 - protein, 523 aa, Artificial sequence
  Corynephage omega: DT387IL2/DAB389IL-2
MGADDVVDSSKSFVMENFSSYHGTKPGYVDSIQKGIQKPKSGTQGNYDDDWKGFYSTDNKYDAAGYSVDNENPLSGKAGGVVKVTYPGLTKVLALKVDNAETIKKELGLSLTEPLMEQVGTEEFIKRFGDGASRVVLSLPFAEGSSSVEYINTWEQAKALSVELEINFETRGKRGQDAMYDYMAQACAGNRVRRSVGSSLSCINLDWDVIRDKTKTKIESLKEHGPIKNKMSESPNKTVSEEKAKQYLEEFHQTALEHPELSELKTVTGTNPVFAGANYAAWAVNVAQVIDSETADNLEKTTAALSILPGIGSVMGIADGAVHHNTEEIVAQSIALSSLMVAQAIPLVGELVDIGFAAYNFVESIINLFQVVHNSYNRPAYSPGHKTHAAPTSSSTKKTQLQLEHLLLDLQMILNGINNYKNPKLTRMLTFKFYMPKKATELKHLLQCLEEELKPLEEVLNLAQSKNFHLRPRDLISNINVIVLELKGSETTFMCEYADETATIVEFLNRWITFCQSIISTLT

SEQ ID NO: 17 - DNA, 1602 bp, Artificial sequence
  Corynephage omega: DT387 linker IL2/DAB389 linker IL2
  CDS (1)..(1602)
atgggcgctgatgatgttgttgattcttctaaatcttttgtgatggaaaacttttcttcgtaccacgggactaaacctggttatgtagattccattcaaaaaggtatacaaaagccaaaatctggtacacaaggaaattatgacgatgattggaaagggttttatagtaccgacaataaatacgacgctgcgggatactctgtagataatgaaaacccgctctctggaaaagctggaggcgtggtcaaagtgacgtatccaggactgacgaaggttctcgcactaaaagtggataatgccgaaactattaagaaagagttaggtttaagtctcactgaaccgttgatggagcaagtcggaacggaagagtttatcaaaaggttcggtgatggtgcttcgcgtgtagtgctcagccttcccttcgctgaggggagttctagcgttgaatatattaataactgggaacaggcgaaagcgttaagcgtagaacttgagattaattttgaaacccgtggaaaacgtggccaagatgcgatgtatgagtatatggctcaagcctgtgcaggaaatcgtgtcaggcgatcagtaggtagctcattgtcatgcatcaacctggattgggatgttatccgtgataaaactaaaactaagatcgaatctctgaaagaacacggtccgatcaaaaacaaaatgagcgaaagcccgaacaaaactgtatctgaagaaaaagctaaacagtacctggaagaattccaccagactgcactggaacacccggaactgtctgaacttaagaccgttactggtaccaacccggtattcgctggtgctaactacgctgcttgggcagtaaacgttgctcaggttatcgatagcgaaactgctgataacctggaaaaaactaccgcggctctgtctatcctgccgggtatcggtagcgtaatgggcatcgcagacggcgccgttcaccacaacactgaagaaatcgttgcacagtctatcgctctgagctctctgatggttgctcaggccatcccgctggtaggtgaactggttgatatcggtttcgctgcatacaacttcgttgaaagcatcatcaacctgttccaggttgttcacaactcttacaaccgcccggcttactctccgggtcacaagacgcatgcatctagcggaggtggctctagcggtggaggatccgcacctacttctagctctaccaagaaaacccagctgcagctcgagcacctgctgctggatttgcagatgatcctgaacggtatcaacaattacaagaacccgaaactgacgcgtatgctgaccttcaagttctacatgccgaagaaggccaccgaactgaaacacctgctgcagtgtctagaagaagaactgaaaccgctggaggaagttctgaacctggctcagtctaaaaacttccacctgcggccgcgtgacctgatctctaacatcaacgtaatcgttctggaactgaagggctctgaaaccaccttcatgtgtgaatacgctgatgagaccgcaaccatcgtagaattcctgaaccgttggatcaccttctgtcagtctatcatctctaccctgacc

SEQ ID NO: 18 - protein, 534 aa, Artificial sequence
  Corynephage omega: DT387 linker IL2/DAB389 linker IL2
MGADDVVDSSKSFVMENFSSYHGTKPGYVDSIQKGIQKPKSGTQGNYDDDWKGFYSTDNKYDAAGYSVDNENPLSGKAGGVVKVTYPGLTKVLALKVDNAETIKKELGLSLTEPLMEQVGTEEFIKRFGDGASRVVLSLPFAEGSSSVEYINNWEQAKALSVELEINFETRGKRGQDAMYEYMAQACAGNRVRRSVGSSLSCINLDWDVIRDKTKTKIESLKEHGPIKNKMSESPNKTVSEEKAKQYLEEFHQTALEHPELSELKTVTGTNPVFAGANYAAWAVNVAQVIDSETADNLEKTTAALSILPGIGSVMGIADGAVHHNTEEIVAQSIALSSLMVAQAIPLVGELVDIGFAAYNFVESIINLFQVVHNSYNRPAYSPGHKTHASSGGGSSGGGSAPTSSSTKKTQLQLEHLLLDLQMILNGINNYKNPKLTRMLTFKFYMPKKATELKHLLQCLEEELKPLEEVLNLAQSKNFHLRPRDLISNINVIVLELKGSETTFMCEYADETATIVEFLNRWITFCQSIISTLT

SEQ ID NO: 19 - DNA, 1602 bp, Artificial sequence
  Corynephage omega: DT387(V7A)linkerIL2
  CDS (1)..(1602)
atgggcgctgatgatgttgctgattcttctaaatcttttgtgatggaaaacttttcttcgtaccacgggactaaacctggttatgtagattccattcaaaaaggtatacaaaagccaaaatctggtacacaaggaaattatgacgatgattggaaagggttttatagtaccgacaataaatacgacgctgcgggatactctgtagataatgaaaacccgctctctggaaaagctggaggcgtggtcaaagtgacgtatccaggactgacgaaggttctcgcactaaaagtggataatgccgaaactattaagaaagagttaggtttaagtctcactgaaccgttgatggagcaagtcggaacggaagagtttatcaaaaggttcggtgatggtgcttcgcgtgtagtgctcagccttcccttcgctgaggggagttctagcgttgaatatattaataactgggaacaggcgaaagcgttaagcgtagaacttgagattaattttgaaacccgtggaaaacgtggccaagatgcgatgtatgagtatatggctcaagcctgtgcaggaaatcgtgtcaggcgatcagtaggtagctcattgtcatgcatcaacctggattgggatgttatccgtgataaaactaaaactaagatcgaatctctgaaagaacacggtccgatcaaaaacaaaatgagcgaaagcccgaacaaaactgtatctgaagaaaaagctaaacagtacctggaagaattccaccagactgcactggaacacccggaactgtctgaacttaagaccgttactggtaccaacccggtattcgctggtgctaactacgctgcttgggcagtaaacgttgctcaggttatcgatagcgaaactgctgataacctggaaaaaactaccgcggctctgtctatcctgccgggtatcggtagcgtaatgggcatcgcagacggcgccgttcaccacaacactgaagaaatcgttgcacagtctatcgctctgagctctctgatggttgctcaggccatcccgctggtaggtgaactggttgatatcggtttcgctgcatacaacttcgttgaaagcatcatcaacctgttccaggttgttcacaactcttacaaccgcccggcttactctccgggtcacaagacgcatgcatctagcggaggtggctctagcggtggaggatccgcacctacttctagctctaccaagaaaacccagctgcagctcgagcacctgctgctggatttgcagatgatcctgaacggtatcaacaattacaagaacccgaaactgacgcgtatgctgaccttcaagttctacatgccgaagaaggccaccgaactgaaacacctgctgcagtgtctagaagaagaactgaaaccgctggaggaagttctgaacctggctcagtctaaaaacttccacctgcggccgcgtgacctgatctctaacatcaacgtaatcgttctggaactgaagggctctgaaaccaccttcatgtgtgaatacgctgatgagaccgcaaccatcgtagaattcctgaaccgttggatcaccttctgtcagtctatcatctctaccctgacc

SEQ ID NO: 20 - protein, 534 aa, Artificial sequence
  Corynephage omega: DT387(V7A)linkerIL2
MGADDVADSSKSFVMENFSSYHGTKPGYVDSIQKGIQKPKSGTQGNYDDDWKGFYSTDNKYDAAGYSVDNENPLSGKAGGVVKVTYPGLTKVLALKVDNAETIKKELGLSLTEPLMEQVGTEEFIKRFGDGASRVVLSLPFAEGSSSVEYINNWEQAKALSVELEINFETRGKRGQDAMYEYMAQACAGNRVRRSVGSSLSCINLDWDVIRDKTKTKIESLKEHGPIKNKMSESPNKTVSEEKAKQYLEEFHQTALEHPELSELKTVTGTNPVFAGANYAAWAVNVAQVIDSETADNLEKTTAALSILPGIGSVMGIADGAVHHNTEEIVAQSIALSSLMVAQAIPLVGELVDIGFAAYNFVESIINLFQVVHNSYNRPAYSPGHKTHASSGGGSSGGGSAPTSSSTKKTQLQLEHLLLDLQMILNGINNYKNPKLTRMLTFKFYMPKKATELKHLLQCLEEELKPLEEVLNLAQSKNFHLRPRDLISNINVIVLELKGSETTFMCEYADETATIVEFLNRWITFCQSIISTLT

SEQ ID NO: 21 - DNA, 1602 bp, Artificial sequence
  Corynephage omega: DT387(D8S)linkerIL2
  CDS (1)..(1602)
atgggcgctgatgatgttgtttcttcttctaaatcttttgtgatggaaaacttttcttcgtaccacgggactaaacctggttatgtagattccattcaaaaaggtatacaaaagccaaaatctggtacacaaggaaattatgacgatgattggaaagggttttatagtaccgacaataaatacgacgctgcgggatactctgtagataatgaaaacccgctctctggaaaagctggaggcgtggtcaaagtgacgtatccaggactgacgaaggttctcgcactaaaagtggataatgccgaaactattaagaaagagttaggtttaagtctcactgaaccgttgatggagcaagtcggaacggaagagtttatcaaaaggttcggtgatggtgcttcgcgtgtagtgctcagccttcccttcgctgaggggagttctagcgttgaatatattaataactgggaacaggcgaaagcgttaagcgtagaacttgagattaattttgaaacccgtggaaaacgtggccaagatgcgatgtatgagtatatggctcaagcctgtgcaggaaatcgtgtcaggcgatcagtaggtagctcattgtcatgcatcaacctggattgggatgttatccgtgataaaactaaaactaagatcgaatctctgaaagaacacggtccgatcaaaaacaaaatgagcgaaagcccgaacaaaactgtatctgaagaaaaagctaaacagtacctggaagaattccaccagactgcactggaacacccggaactgtctgaacttaagaccgttactggtaccaacccggtattcgctggtgctaactacgctgcttgggcagtaaacgttgctcaggttatcgatagcgaaactgctgataacctggaaaaaactaccgcggctctgtctatcctgccgggtatcggtagcgtaatgggcatcgcagacggcgccgttcaccacaacactgaagaaatcgttgcacagtctatcgctctgagctctctgatggttgctcaggccatcccgctggtaggtgaactggttgatatcggtttcgctgcatacaacttcgttgaaagcatcatcaacctgttccaggttgttcacaactcttacaaccgcccggcttactctccgggtcacaagacgcatgcatctagcggaggtggctctagcggtggaggatccgcacctacttctagctctaccaagaaaacccagctgcagctcgagcacctgctgctggatttgcagatgatcctgaacggtatcaacaattacaagaacccgaaactgacgcgtatgctgaccttcaagttctacatgccgaagaaggccaccgaactgaaacacctgctgcagtgtctagaagaagaactgaaaccgctggaggaagttctgaacctggctcagtctaaaaacttccacctgcggccgcgtgacctgatctctaacatcaacgtaatcgttctggaactgaagggctctgaaaccaccttcatgtgtgaatacgctgatgagaccgcaaccatcgtagaattcctgaaccgttggatcaccttctgtcagtctatcatctctaccctgacc

SEQ ID NO: 22 - protein, 534 aa, Artificial sequence
  Corynephage omega: DT387(D8S)linkerIL2
MGADDVVSSSKSFVMENFSSYHGTKPGYVDSIQKGIQKPKSGTQGNYDDDWKGFYSTDNKYDAAGYSVDNENPLSGKAGGVVKVTYPGLTKVLALKVDNAETIKKELGLSLTEPLMEQVGTEEFIKRFGDGASRVVLSLPFAEGSSSVEYINNWEQAKALSVELEINFETRGKRGQDAMYEYMAQACAGNRVRRSVGSSLSCINLDWDVIRDKTKTKIESLKEHGPIKNKMSESPNKTVSEEKAKQYLEEFHQTALEHPELSELKTVTGTNPVFAGANYAAWAVNVAQVIDSETADNLEKTTAALSILPGIGSVMGIADGAVHHNTEEIVAQSIALSSLMVAQAIPLVGELVDIGFAAYNFVESIINLFQVVHNSYNRPAYSPGHKTHASSGGGSSGGGSAPTSSSTKKTQLQLEHLLLDLQMILNGINNYKNPKLTRMLTFKFYMPKKATELKHLLQCLEEELKPLEEVLNLAQSKNFHLRPRDLISNINVIVLELKGSETTFMCEYADETATIVEFLNRWITFCQSIISTLT

SEQ ID NO: 23 - DNA, 1602 bp, Artificial sequence
  Corynephage omega: DT387(D8E)linkerIL2
  CDS (1)..(1602)
atgggcgctgatgatgttgttgaatcttctaaatcttttgtgatggaaaacttttcttcgtaccacgggactaaacctggttatgtagattccattcaaaaaggtatacaaaagccaaaatctggtacacaaggaaattatgacgatgattggaaagggttttatagtaccgacaataaatacgacgctgcgggatactctgtagataatgaaaacccgctctctggaaaagctggaggcgtggtcaaagtgacgtatccaggactgacgaaggttctcgcactaaaagtggataatgccgaaactattaagaaagagttaggtttaagtctcactgaaccgttgatggagcaagtcggaacggaagagtttatcaaaaggttcggtgatggtgcttcgcgtgtagtgctcagccttcccttcgctgaggggagttctagcgttgaatatattaataactgggaacaggcgaaagcgttaagcgtagaacttgagattaattttgaaacccgtggaaaacgtggccaagatgcgatgtatgagtatatggctcaagcctgtgcaggaaatcgtgtcaggcgatcagtaggtagctcattgtcatgcatcaacctggattgggatgttatccgtgataaaactaaaactaagatcgaatctctgaaagaacacggtccgatcaaaaacaaaatgagcgaaagcccgaacaaaactgtatctgaagaaaaagctaaacagtacctggaagaattccaccagactgcactggaacacccggaactgtctgaacttaagaccgttactggtaccaacccggtattcgctggtgctaactacgctgcttgggcagtaaacgttgctcaggttatcgatagcgaaactgctgataacctggaaaaaactaccgcggctctgtctatcctgccgggtatcggtagcgtaatgggcatcgcagacggcgccgttcaccacaacactgaagaaatcgttgcacagtctatcgctctgagctctctgatggttgctcaggccatcccgctggtaggtgaactggttgatatcggtttcgctgcatacaacttcgttgaaagcatcatcaacctgttccaggttgttcacaactcttacaaccgcccggcttactctccgggtcacaagacgcatgcatctagcggaggtggctctagcggtggaggatccgcacctacttctagctctaccaagaaaacccagctgcagctcgagcacctgctgctggatttgcagatgatcctgaacggtatcaacaattacaagaacccgaaactgacgcgtatgctgaccttcaagttctacatgccgaagaaggccaccgaactgaaacacctgctgcagtgtctagaagaagaactgaaaccgctggaggaagttctgaacctggctcagtctaaaaacttccacctgcggccgcgtgacctgatctctaacatcaacgtaatcgttctggaactgaagggctctgaaaccaccttcatgtgtgaatacgctgatgagaccgcaaccatcgtagaattcctgaaccgttggatcaccttctgtcagtctatcatctctaccctgacc

SEQ ID NO: 24 - protein, 534 aa, Artificial sequence
  Corynephage omega: DT387(D8E)linkerIL2
MGADDVVESSKSFVMENFSSYHGTKPGYVDSIQKGIQKPKSGTQGNYDDDWKGFYSTDNKYDAAGYSVDNENPLSGKAGGVVKVTYPGLTKVLALKVDNAETIKKELGLSLTEPLMEQVGTEEFIKRFGDGASRVVLSLPFAEGSSSVEYINNWEQAKALSVELEINFETRGKRGQDAMYEYMAQACAGNRVRRSVGSSLSCINLDWDVIRDKTKTKIESLKEHGPIKNKMSESPNKTVSEEKAKQYLEEFHQTALEHPELSELKTVTGTNPVFAGANYAAWAVNVAQVIDSETADNLEKTTAALSILPGIGSVMGIADGAVHHNTEEIVAQSIALSSLMVAQAIPLVGELVDIGFAAYNFVESIINLFQVVHNSYNRPAYSPGHKTHASSGGGSSGGGSAPTSSSTKKTQLQLEHLLLDLQMILNGINNYKNPKLTRMLTFKFYMPKKATELKHLLQCLEEELKPLEEVLNLAQSKNFHLRPRDLISNINVIVLELKGSETTFMCEYADETATIVEFLNRWITFCQSIISTLT

SEQ ID NO: 25 - DNA, 1602 bp, Artificial sequence
  Corynephage omega: DT387(V29A)linkerIL2
  CDS (1)..(1602)
atgggcgctgatgatgttgttgattcttctaaatcttttgtgatggaaaacttttcttcgtaccacgggactaaacctggttatgcagattccattcaaaaaggtatacaaaagccaaaatctggtacacaaggaaattatgacgatgattggaaagggttttatagtaccgacaataaatacgacgctgcgggatactctgtagataatgaaaacccgctctctggaaaagctggaggcgtggtcaaagtgacgtatccaggactgacgaaggttctcgcactaaaagtggataatgccgaaactattaagaaagagttaggtttaagtctcactgaaccgttgatggagcaagtcggaacggaagagtttatcaaaaggttcggtgatggtgcttcgcgtgtagtgctcagccttcccttcgctgaggggagttctagcgttgaatatattaataactgggaacaggcgaaagcgttaagcgtagaacttgagattaattttgaaacccgtggaaaacgtggccaagatgcgatgtatgagtatatggctcaagcctgtgcaggaaatcgtgtcaggcgatcagtaggtagctcattgtcatgcatcaacctggattgggatgttatccgtgataaaactaaaactaagatcgaatctctgaaagaacacggtccgatcaaaaacaaaatgagcgaaagcccgaacaaaactgtatctgaagaaaaagctaaacagtacctggaagaattccaccagactgcactggaacacccggaactgtctgaacttaagaccgttactggtaccaacccggtattcgctggtgctaactacgctgcttgggcagtaaacgttgctcaggttatcgatagcgaaactgctgataacctggaaaaaactaccgcggctctgtctatcctgccgggtatcggtagcgtaatgggcatcgcagacggcgccgttcaccacaacactgaagaaatcgttgcacagtctatcgctctgagctctctgatggttgctcaggccatcccgctggtaggtgaactggttgatatcggtttcgctgcatacaacttcgttgaaagcatcatcaacctgttccaggttgttcacaactcttacaaccgcccggcttactctccgggtcacaagacgcatgcatctagcggaggtggctctagcggtggaggatccgcacctacttctagctctaccaagaaaacccagctgcagctcgagcacctgctgctggatttgcagatgatcctgaacggtatcaacaattacaagaacccgaaactgacgcgtatgctgaccttcaagttctacatgccgaagaaggccaccgaactgaaacacctgctgcagtgtctagaagaagaactgaaaccgctggaggaagttctgaacctggctcagtctaaaaacttccacctgcggccgcgtgacctgatctctaacatcaacgtaatcgttctggaactgaagggctctgaaaccaccttcatgtgtgaatacgctgatgagaccgcaaccatcgtagaattcctgaaccgttggatcaccttctgtcagtctatcatctctaccctgacc

SEQ ID NO: 26 - protein, 534 aa, Artificial sequence
  Corynephage omega: DT387(V29A)linkerIL2
MGADDVVDSSKSFVMENFSSYHGTKPGYADSIQKGIQKPKSGTQGNYDDDWKGFYSTDNKYDAAGYSVDNENPLSGKAGGVVKVTYPGLTKVLALKVDNAETIKKELGLSLTEPLMEQVGTEEFIKRFGDGASRVVLSLPFAEGSSSVEYINNWEQAKALSVELEINFETRGKRGQDAMYEYMAQACAGNRVRRSVGSSLSCINLDWDVIRDKTKTKIESLKEHGPIKNKMSESPNKTVSEEKAKQYLEEFHQTALEHPELSELKTVTGTNPVFAGANYAAWAVNVAQVIDSETADNLEKTTAALSILPGIGSVMGIADGAVHHNTEEIVAQSIALSSLMVAQAIPLVGELVDIGFAAYNFVESIINLFQVVHNSYNRPAYSPGHKTHASSGGGSSGGGSAPTSSSTKKTQLQLEHLLLDLQMILNGINNYKNPKLTRMLTFKFYMPKKATELKHLLQCLEEELKPLEEVLNLAQSKNFHLRPRDLISNINVIVLELKGSETTFMCEYADETATIVEFLNRWITFCQSIISTLT

SEQ ID NO: 27 - DNA, 1602 bp, Artificial sequence
  Corynephage omega: DT387(L290A)linkerIL2
  CDS (1)..(1602)
atgggcgctgatgatgttgttgattcttctaaatcttttgtgatggaaaacttttcttcgtaccacgggactaaacctggttatgtagattccattcaaaaaggtatacaaaagccaaaatctggtacacaaggaaattatgacgatgattggaaagggttttatagtaccgacaataaatacgacgctgcgggatactctgtagataatgaaaacccgctctctggaaaagctggaggcgtggtcaaagtgacgtatccaggactgacgaaggttctcgcactaaaagtggataatgccgaaactattaagaaagagttaggtttaagtctcactgaaccgttgatggagcaagtcggaacggaagagtttatcaaaaggttcggtgatggtgcttcgcgtgtagtgctcagccttcccttcgctgaggggagttctagcgttgaatatattaataactgggaacaggcgaaagcgttaagcgtagaacttgagattaattttgaaacccgtggaaaacgtggccaagatgcgatgtatgagtatatggctcaagcctgtgcaggaaatcgtgtcaggcgatcagtaggtagctcattgtcatgcatcaacctggattgggatgttatccgtgataaaactaaaactaagatcgaatctctgaaagaacacggtccgatcaaaaacaaaatgagcgaaagcccgaacaaaactgtatctgaagaaaaagctaaacagtacctggaagaattccaccagactgcactggaacacccggaactgtctgaacttaagaccgttactggtaccaacccggtattcgctggtgctaactacgctgcttgggcagtaaacgttgctcaggttgcagatagcgaaactgctgataacctggaaaaaactaccgcggctctgtctatcctgccgggtatcggtagcgtaatgggcatcgcagacggcgccgttcaccacaacactgaagaaatcgttgcacagtctatcgctctgagctctctgatggttgctcaggccatcccgctggtaggtgaactggttgatatcggtttcgctgcatacaacttcgttgaaagcatcatcaacctgttccaggttgttcacaactcttacaaccgcccggcttactctccgggtcacaagacgcatgcatctagcggaggtggctctagcggtggaggatccgcacctacttctagctctaccaagaaaacccagctgcagctcgagcacctgctgctggatttgcagatgatcctgaacggtatcaacaattacaagaacccgaaactgacgcgtatgctgaccttcaagttctacatgccgaagaaggccaccgaactgaaacacctgctgcagtgtctagaagaagaactgaaaccgctggaggaagttctgaacctggctcagtctaaaaacttccacctgcggccgcgtgacctgatctctaacatcaacgtaatcgttctggaactgaagggctctgaaaccaccttcatgtgtgaatacgctgatgagaccgcaaccatcgtagaattcctgaaccgttggatcaccttctgtcagtctatcatctctaccctgacc

SEQ ID NO: 28 - protein, 534 aa, Artificial sequence
  Corynephage omega: DT387(L290A)linkerIL2
MGADDVVDSSKSFVMENFSSYHGTKPGYVDSIQKGIQKPKSGTQGNYDDDWKGFYSTDNKYDAAGYSVDNENPLSGKAGGVVKVTYPGLTKVLALKVDNAETIKKELGLSLTEPLMEQVGTEEFIKRFGDGASRVVLSLPFAEGSSSVEYINNWEQAKALSVELEINFETRGKRGQDAMYEYMAQACAGNRVRRSVGSSLSCINLDWDVIRDKTKTKIESLKEHGPIKNKMSESPNKTVSEEKAKQYLEEFHQTALEHPELSELKTVTGTNPVFAGANYAAWAVNVAQVADSETADNLEKTTAALSILPGIGSVMGIADGAVHHNTEEIVAQSIALSSLMVAQAIPLVGELVDIGFAAYNFVESIINLFQVVHNSYNRPAYSPGHKTHASSGGGSSGGGSAPTSSSTKKTQLQLEHLLLDLQMILNGINNYKNPKLTRMLTFKFYMPKKATELKHLLQCLEEELKPLEEVLNLAQSKNFHLRPRDLISNINVIVLELKGSETTFMCEYADETATIVEFLNRWITFCQSIISTLT

SEQ ID NO: 29 - DNA, 1602 bp, Artificial sequence
  Corynephage omega: DT387(L291E)linkerIL2
  CDS (1)..(1602)
atgggcgctgatgatgttgttgattcttctaaatcttttgtgatggaaaacttttcttcgtaccacgggactaaacctggttatgtagattccattcaaaaaggtatacaaaagccaaaatctggtacacaaggaaattatgacgatgattggaaagggttttatagtaccgacaataaatacgacgctgcgggatactctgtagataatgaaaacccgctctctggaaaagctggaggcgtggtcaaagtgacgtatccaggactgacgaaggttctcgcactaaaagtggataatgccgaaactattaagaaagagttaggtttaagtctcactgaaccgttgatggagcaagtcggaacggaagagtttatcaaaaggttcggtgatggtgcttcgcgtgtagtgctcagccttcccttcgctgaggggagttctagcgttgaatatattaataactgggaacaggcgaaagcgttaagcgtagaacttgagattaattttgaaacccgtgaaaaacgtggccaagatgcgatgtatgagtatatggctcaagcctgtgcaggaaatcgtgtcaggcgatcagtaggtagctcattgtcatgcatcaacctggattgggatgttatccgtgataaaactaaaactaagatcgaatctctgaaagaacacggtccgatcaaaaacaaaatgagcgaaagcccgaacaaaactgtatctgaagaaaaagctaaacagtacctggaagaattccaccagactgcactggaacacccggaactgtctgaacttaagaccgttactggtaccaacccggtattcgctggtgctaactacgctgcttgggcagtaaacgttgctcaggttatcgaaagcgaaactgctgataacctggaaaaaactaccgcggctctgtctatcctgccgggtatcggtagcgtaatgggcatcgcagacggcgccgttcaccacaacactgaagaaatcgttgcacagtctatcgctctgagctctctgatggttgctcaggccatcccgctggtaggtgaactggttgatatcggtttcgctgcatacaacttcgttgaaagcatcatcaacctgttccaggttgttcacaactcttacaaccgcccggcttactctccgggtcacaagacgcatgcatctagcggaggtggctctagcggtggaggatccgcacctacttctagctctaccaagaaaacccagctgcagctcgagcacctgctgctggatttgcagatgatcctgaacggtatcaacaattacaagaacccgaaactgacgcgtatgctgaccttcaagttctacatgccgaagaaggccaccgaactgaaacacctgctgcagtgtctagaagaagaactgaaaccgctggaggaagttctgaacctggctcagtctaaaaacttccacctgcggccgcgtgacctgatctctaacatcaacgtaatcgttctggaactgaagggctctgaaaccaccttcatgtgtgaatacgctgatgagaccgcaaccatcgtagaattcctgaaccgttggatcaccttctgtcagtctatcatctctaccctgacc

SEQ ID NO: 30 - protein, 534 aa, Artificial sequence
  Corynephage omega: DT387(L291E)linkerIL2
MGADDVVDSSKSFVMENFSSYHGTKPGYVDSIQKGIQKPKSGTQGNYDDDWKGFYSTDNKYDAAGYSVDNENPLSGKAGGVVKVTYPGLTKVLALKVDNAETIKKELGLSLTEPLMEQVGTEEFIKRFGDGASRVVLSLPFAEGSSSVEYINNWEQAKALSVELEINFETREKRGQDAMYEYMAQACAGNRVRRSVGSSLSCINLDWDVIRDKTKTKIESLKEHGPIKNKMSESPNKTVSEEKAKQYLEEFHQTALEHPELSELKTVTGTNPVFAGANYAAWAVNVAQVIESETADNLEKTTAALSILPGIGSVMGIADGAVHHNTEEIVAQSIALSSLMVAQAIPLVGELVDIGFAAYNFVESIINLFQVVHNSYNRPAYSPGHKTHASSGGGSSGGGSAPTSSSTKKTQLQLEHLLLDLQMILNGINNYKNPKLTRMLTFKFYMPKKATELKHLLQCLEEELKPLEEVLNLAQSKNFHLRPRDLISNINVIVLELKGSETTFMCEYADETATIVEFLNRWITFCQSIISTLT

SEQ ID NO: 31 - DNA, 2097 bp, Artificial sequence
  Corynephage omega: DT387(V7AV29A)linkerIL2
  CDS (1)..(1602)
atgggcgctgatgatgttgctgattcttctaaatcttttgtgatggaaaacttttcttcgtaccacgggactaaacctggttatgcagattccattcaaaaaggtatacaaaagccaaaatctggtacacaaggaaattatgacgatgattggaaagggttttatagtaccgacaataaatacgacgctgcgggatactctgtagataatgaaaacccgctctctggaaaagctggaggcgtggtcaaagtgacgtatccaggactgacgaaggttctcgcactaaaagtggataatgccgaaactattaagaaagagttaggtttaagtctcactgaaccgttgatggagcaagtcggaacggaagagtttatcaaaaggttcggtgatggtgcttcgcgtgtagtgctcagccttcccttcgctgaggggagttctagcgttgaatatattaataactgggaacaggcgaaagcgttaagcgtagaacttgagattaattttgaaacccgtggaaaacgtggccaagatgcgatgtatgagtatatggctcaagcctgtgcaggaaatcgtgtcaggcgatcagtaggtagctcattgtcatgcatcaacctggattgggatgttatccgtgataaaactaaaactaagatcgaatctctgaaagaacacggtccgatcaaaaacaaaatgagcgaaagcccgaacaaaactgtatctgaagaaaaagctaaacagtacctggaagaattccaccagactgcactggaacacccggaactgtctgaacttaagaccgttactggtaccaacccggtattcgctggtgctaactacgctgcttgggcagtaaacgttgctcaggttatcgatagcgaaactgctgataacctggaaaaaactaccgcggctctgtctatcctgccgggtatcggtagcgtaatgggcatcgcagacggcgccgttcaccacaacactgaagaaatcgttgcacagtctatcgctctgagctctctgatggttgctcaggccatcccgctggtaggtgaactggttgatatcggtttcgctgcatacaacttcgttgaaagcatcatcaacctgttccaggttgttcacaactcttacaaccgcccggcttactctccgggtcacaagacgcatgcatctagcggaggtggctctagcggtggaggatccgcacctacttctagctctaccaagaaaacccagctgcagctcgagcacctgctgctggatttgcagatgatcctgaacggtatcaacaattacaagaacccgaaactgacgcgtatgctgaccttcaagttctacatgccgaagaaggccaccgaactgaaacacctgctgcagtgtctagaagaagaactgaaaccgctggaggaagttctgaacctggctcagtctaaaaacttccacctgcggccgcgtgacctgatctctaacatcaacgtaatcgttctggaactgaagggctctgaaaccaccttcatgtgtgaagcacagtctatcgctctgagctctctgatggttgctcaggccatcccgctggtaggtgaactggttgatatcggtttcgctgcatacaacttcgttgaaagcatcatcaacctgttccaggttgttcacaactcttacaaccgcccggcttactctccgggtcacaagacgcatgcacctacttctagctctaccaagaaaacccagctgcagctcgagcacctgctgctggatttgcagatgatcctgaacggtatcaacaattacaagaacccgaaactgacgcgtatgctgaccttcaagttctacatgccgaagaaggccaccgaactgaaacacctgctgcagtgtctagaagaagaactgaaaccgctggaggaagttctgaacctggctcagtctaaaaacttccacctgcggccgcgtgacctgatctctaacatcaacgtaatcgttctggaactgaagggctctgaaaccaccttcatgtgtgaatacgctgatgagaccgcaaccatcgtagaattcctgaaccgttggatcaccttctgtcagtctatcatctctaccctgacc

SEQ ID NO: 32 - protein, 534 aa, Artificial sequence
  Corynephage omega: DT387(V7AV29A)linkerIL2
MGADDVADSSKSFVMENFSSYHGTKPGYADSIQKGIQKPKSGTQGNYDDDWKGFYSTDNKYDAAGYSVDNENPLSGKAGGVVKVTYPGLTKVLALKVDNAETIKKELGLSLTEPLMEQVGTEEFIKRFGDGASRVVLSLPFAEGSSSVEYINNWEQAKALSVELEINFETRGKRGQDAMYEYMAQACAGNRVRRSVGSSLSCINLDWDVIRDKTKTKIESLKEHGPIKNKMSESPNKTVSEEKAKQYLEEFHQTALEHPELSELKTVTGTNPVFAGANYAAWAVNVAQVIDSETADNLEKTTAALSILPGIGSVMGIADGAVHHNTEEIVAQSIALSSLMVAQAIPLVGELVDIGFAAYNFVESIINLFQVVHNSYNRPAYSPGHKTHASSGGGSSGGGSAPTSSSTKKTQLQLEHLLLDLQMILNGINNYKNPKLTRMLTFKFYMPKKATELKHLLQCLEEELKPLEEVLNLAQSKNFHLRPRDLISNINVIVLELKGSETTFMCEAQSIALSSLMVAQAIPLVGELVDIGFA

SEQ ID NO: 33 - DNA, 1602 bp, Artificial sequence
  Corynephage omega: DT387(V7AV29AD291E)linkerIL2
  CDS (1)..(1602)
atgggcgctgatgatgttgctgattcttctaaatcttttgtgatggaaaacttttcttcgtaccacgggactaaacctggttatgcagattccattcaaaaaggtatacaaaagccaaaatctggtacacaaggaaattatgacgatgattggaaagggttttatagtaccgacaataaatacgacgctgcgggatactctgtagataatgaaaacccgctctctggaaaagctggaggcgtggtcaaagtgacgtatccaggactgacgaaggttctcgcactaaaagtggataatgccgaaactattaagaaagagttaggtttaagtctcactgaaccgttgatggagcaagtcggaacggaagagtttatcaaaaggttcggtgatggtgcttcgcgtgtagtgctcagccttcccttcgctgaggggagttctagcgttgaatatattaataactgggaacaggcgaaagcgttaagcgtagaacttgagattaattttgaaacccgtggaaaacgtggccaagatgcgatgtatgagtatatggctcaagcctgtgcaggaaatcgtgtcaggcgatcagtaggtagctcattgtcatgcatcaacctggattgggatgttatccgtgataaaactaaaactaagatcgaatctctgaaagaacacggtccgatcaaaaacaaaatgagcgaaagcccgaacaaaactgtatctgaagaaaaagctaaacagtacctggaagaattccaccagactgcactggaacacccggaactgtctgaacttaagaccgttactggtaccaacccggtattcgctggtgctaactacgctgcttgggcagtaaacgttgctcaggttatcgaaagcgaaactgctgataacctggaaaaaactaccgcggctctgtctatcctgccgggtatcggtagcgtaatgggcatcgcagacggcgccgttcaccacaacactgaagaaatcgttgcacagtctatcgctctgagctctctgatggttgctcaggccatcccgctggtaggtgaactggttgatatcggtttcgctgcatacaacttcgttgaaagcatcatcaacctgttccaggttgttcacaactcttacaaccgcccggcttactctccgggtcacaagacgcatgcatctagcggaggtggctctagcggtggaggatccgcacctacttctagctctaccaagaaaacccagctgcagctcgagcacctgctgctggatttgcagatgatcctgaacggtatcaacaattacaagaacccgaaactgacgcgtatgctgaccttcaagttctacatgccgaagaaggccaccgaactgaaacacctgctgcagtgtctagaagaagaactgaaaccgctggaggaagttctgaacctggctcagtctaaaaacttccacctgcggccgcgtgacctgatctctaacatcaacgtaatcgttctggaactgaagggctctgaaaccaccttcatgtgtgaatacgctgatgagaccgcaaccatcgtagaattcctgaaccgttggatcaccttctgtcagtctatcatctctaccctgacc

SEQ ID NO: 34 - protein, 534 aa, Artificial sequence
  Corynephage omega: DT387(V7AV29AD291E)linkerIL2
MGADDVADSSKSFVMENFSSYHGTKPGYADSIQKGIQKPKSGTQGNYDDDWKGFYSTDNKYDAAGYSVDNENPLSGKAGGVVKVTYPGLTKVLALKVDNAETIKKELGLSLTEPLMEQVGTEEFIKRFGDGASRVVLSLPFAEGSSSVEYINNWEQAKALSVELEINFETRGKRGQDAMYEYMAQACAGNRVRRSVGSSLSCINLDWDVIRDKTKTKIESLKEHGPIKNKMSESPNKTVSEEKAKQYLEEFHQTALEHPELSELKTVTGTNPVFAGANYAAWAVNVAQVIESETADNLEKTTAALSILPGIGSVMGIADGAVHHNTEEIVAQSIALSSLMVAQAIPLVGELVDIGFAAYNFVESIINLFQVVHNSYNRPAYSPGHKTHASSGGGSSGGGSAPTSSSTKKTQLQLEHLLLDLQMILNGINNYKNPKLTRMLTFKFYMPKKATELKHLLQCLEEELKPLEEVLNLAQSKNFHLRPRDLISNINVIVLELKGSETTFMCEYADETATIVEFLNRWITFCQSIISTLT

SEQ ID NO: 35 - DNA, 1602 bp, Artificial sequence; identical to SEQ ID NO: 17
  Corynephage omega: DT387(D8SV29A)linkerIL2
  CDS (1)..(1602)

SEQ ID NO: 36 - protein, 534 aa, Artificial sequence; identical to SEQ ID NO: 18
  Corynephage omega: DT387(D8SV29A)linkerIL2

SEQ ID NO: 37 - DNA, 1602 bp, Artificial sequence; identical to SEQ ID NO: 17
  Corynephage omega: DAB389(V7AV29AI290A)linkerIL2
  CDS (1)..(1602)

SEQ ID NO: 38 - protein, 534 aa, Artificial sequence; identical to SEQ ID NO: 18
  Corynephage omega: DAB389(V7AV29AI290A)linkerIL2

SEQ ID NO: 39 - DNA, 1359 bp, Artificial sequence
  Corynephage omega: DT387(V29A)linkerEGF
  CDS (1)..(1359)
atgggcgctgatgatgttgttgattcttctaaatcttttgtgatggaaaacttttcttcgtaccacgggactaaacctggttatgtagattccattcaaaaaggtatacaaaagccaaaatctggtacacaaggaaattatgacgatgattggaaagggttttatagtaccgacaataaatacgacgctgcgggatactctgtagataatgaaaacccgctctctggaaaagctggaggcgtggtcaaagtgacgtatccaggactgacgaaggttctcgcactaaaagtggataatgccgaaactattaagaaagagttaggtttaagtctcactgaaccgttgatggagcaagtcggaacggaagagtttatcaaaaggttcggtgatggtgcttcgcgtgtagtgctcagccttcccttcgctgaggggagttctagcgttgaatatattaataactgggaacaggcgaaagcgttaagcgtagaacttgagattaattttgaaacccgtggaaaacgtggccaagatgcgatgtatgagtatatggctcaagcctgtgcaggaaatcgtgtcaggcgatcagtaggtagctcattgtcatgcatcaacctggattgggatgttatccgtgataaaactaaaactaagatcgaatctctgaaagaacacggtccgatcaaaaacaaaatgagcgaaagcccgaacaaaactgtatctgaagaaaaagctaaacagtacctggaagaattccaccagactgcactggaacacccggaactgtctgaacttaagaccgttactggtaccaacccggtattcgctggtgctaactacgctgcttgggcagtaaacgttgctcaggttatcgatagcgaaactgctgataccctggaaaaaactaccgcggctctgtctatcctgccgggtatcggtagcgtaatgggcatcgcagacggcgccgttcaccacaacactgaagaaatcgttgcacagtctatcgctctgagctctctgatggttgctcaggccatcccgctggtaggtgaactggttgatatcggtttcgctgcatacaacttcgttgaaagcatcatcaacctgttccaggttgttcacaactcttacaaccgcccggcttactctccgggtcacaagacgcatgcatctagcggaggtggctctagcggtggaggatccaacagcgatagcgaatgcccgctgagccatgatggctattgcctgcatgatggcgtgtgcatgtatattgaagcgctggataaatatgcgtgcaactgcgtggtgggctatattggcgaacgctgccagtatcgcgatctgaaatggtgggaactgcgc

SEQ ID NO: 40 - protein, 453 aa, Artificial sequence
  Corynephage omega: DT387(V29A)linkerEGF
MGADDVVDSSKSFVMENFSSYHGTKPGYVDSIQKGIQKPKSGTQGNYDDDWKGFYSTDNKYDAAGYSVDNENPLSGKAGGVVKVTYPGLTKVLALKVDNAETIKKELGLSLTEPLMEQVGTEEFIKRFGDGASRVVLSLPFAEGSSSVEYINNWEQAKALSVELEINFETRGKRGQDAMYEYMAQACAGNRVRRSVGSSLSCINLDWDVIRDKTKTKIESLKEHGPIKNKMSESPNKTVSEEKAKQYLEEFHQTALEHPELSELKTVTGTNPVFAGANYAAWAVNVAQVIDSETADTLEKTTAALSILPGIGSVMGIADGAVHHNTEEIVAQSIALSSLMVAQAIPLVGELVDIGFAAYNFVESIINLFQVVHNSYNRPAYSPGHKTHASSGGGSSGGGSNSDSECPLSHDGYCLHDGVCMYIEALDKYACNCVVGYIGERCQYRDLKWWELR

SEQ ID NO: 41 - DNA, 1359 bp, Artificial sequence
  Corynephage omega: DT387(V291E)linkerEGF
  CDS (1)..(1359)
atgggcgctgatgatgttgttgattcttctaaatcttttgtgatggaaaacttttcttcgtaccacgggactaaacctggttatgtagattccattcaaaaaggtatacaaaagccaaaatctggtacacaaggaaattatgacgatgattggaaagggttttatagtaccgacaataaatacgacgctgcgggatactctgtagataatgaaaacccgctctctggaaaagctggaggcgtggtcaaagtgacgtatccaggactgacgaaggttctcgcactaaaagtggataatgccgaaactattaagaaagagttaggtttaagtctcactgaaccgttgatggagcaagtcggaacggaagagtttatcaaaaggttcggtgatggtgcttcgcgtgtagtgctcagccttcccttcgctgaggggagttctagcgttgaatatattaataactgggaacaggcgaaagcgttaagcgtagaacttgagattaattttgaaacccgtggaaaacgtggccaagatgcgatgtatgagtatatggctcaagcctgtgcaggaaatcgtgtcaggcgatcagtaggtagctcattgtcatgcatcaacctggattgggatgttatccgtgataaaactaaaactaagatcgaatctctgaaagaacacggtccgatcaaaaacaaaatgagcgaaagcccgaacaaaactgtatctgaagaaaaagctaaacagtacctggaagaattccaccagactgcactggaacacccggaactgtctgaacttaagaccgttactggtaccaacccggtattcgctggtgctaactacgctgcttgggcagtaaacgttgctcaggttatcgatagcgaaactgctgataacctggaaaaaactaccgcggctctgtctatcctgccgggtatcggtagcgtaatgggcatcgcagacggcgccgttcaccacaacactgaagaaatcgttgcacagtctatcgctctgagctctctgatggttgctcaggccatcccgctggtaggtgaactggttgatatcggtttcgctgcatacaacttcgttgaaagcatcatcaacctgttccaggttgttcacaactcttacaaccgcccggcttactctccgggtcacaagacgcatgcatctagcggaggtggctctagcggtggaggatccaacagcgatagcgaatgcccgctgagccatgatggctattgcctgcatgatggcgtgtgcatgtatattgaagcgctggataaatatgcgtgcaactgcgtggtgggctatattggcgaacgctgccagtatcgcgatctgaaatggtgggaactgcgc

SEQ ID NO: 42 - protein, 453 aa, Artificial sequence
  Corynephage omega: DT387(V291E)linkerEGF
MGADDVVDSSKSFVMENFSSYHGTKPGYVDSIQKGIQKPKSGTQGNYDDDWKGFYSTDNKYDAAGYSVDNENPLSGKAGGVVKVTYPGLTKVLALKVDNAETIKKELGLSLTEPLMEQVGTEEFIKRFGDGASRVVLSLPFAEGSSSVEYINNWEQAKALSVELEINFETRGKRGQDAMYEYMAQACAGNRVRRSVGSSLSCINLDWDVIRDKTKTKIESLKEHGPIKNKMSESPNKTVSEEKAKQYLEEFHQTALEHPELSELKTVTGTNPVFAGANYAAWAVNVAQVIDSETADNLEKTTAALSILPGIGSVMGIADGAVHHNTEEIVAQSIALSSLMVAQAIPLVGELVDIGFAAYNFVESIINLFQVVHNSYNRPAYSPGHKTHASSGGGSSGGGSNSDSECPLSHDGYCLHDGVCMYIEALDKYACNCVVGYIGERCQYRDLKWWELR

SEQ ID NO: 43 - DNA, 1359 bp, Artificial sequence; identical to SEQ ID NO: 41
  Corynephage omega: DT387(D8EV29A)linkerEGF
  CDS (1)..(1359)

SEQ ID NO: 44 - protein, 453 aa, Artificial sequence; identical to SEQ ID NO: 42
  Corynephage omega: DT387(D8EV29A)linkerEGF

SEQ ID NO: 45 - DNA, 1359 bp, Artificial sequence
  Corynephage omega: DT387(V7SV29A)linkerEGF
  CDS (1)..(1359)
atgggcgctgatgatgttgttgattcttctaaatcttttgtgatggaaaacttttcttcgtaccacgggactaaacctggttatgtagattccattcaaaaaggtatacaaaagccaaaatctggtacacaaggaaattatgacgatgattggaaagggttttatagtaccgacaataaatacgacgctgcgggatactctgtagataatgaaaacccgctctctggaaaagctggaggcgtggtcaaagtgacgtatccaggactgacgaaggttctcgcactaaaagtggataatgccgaaactattaagaaagagttaggtttaagtctcactgaaccgttgatggagcaagtcggaacggaagagtttatcaaaaggttcggtgatggtgcttcgcgtgtagtgctcagccttcccttcgctgaggggagttctagcgttgaatatattaataactgggaacaggcgaaagcgttaagcgtagaacttgagattaattttgaaacccgtggaaaacgtggccaagatgcgatgtatgagtatatggctcaagcctgtgcaggaaatcgtgtcaggcgatcagtaggtagctcattgtcatgcatcaacctggattgggatgttatccgtgataaaactaaaactaagatcgaatctctgaaagaacacggtccgatcaaaaacaaaatgagcgaaagcccgaacaaaactgtatctgaagaaaaagctaaacagtacctggaagaattccaccagactgcactggaacacccggaactgtctgaacttaagaccgttactggtaccaacccggtattcgctggtgctaactacgctgcttgggcagtaaacgttgctcaggttatcgatagcgaaactgctgataacctggaaaaaactaccgcggctctgtctatcctgccgggtatcggtagcgtaatgggcatcgcagacggcgccgttcaccacaacactgaagaaatcgttgcacagtctatcgctctgagctctctgatggttgctcaggccatcccgctggtaggtgaactggttgatatcggtttcgctgcatacaacttcgttgaaagcatcatcaacctgttccaggttgttcacaactcttacaaccgcccggcttactctccgggtcacaagacgcatgcatctagcggaggtggctctagcggtggaggatccaacagcgatagcgaatgcccgctgagccatgatggctattgcctgcatgatggcgtgtgcatgtatattgaagcgctggataaatatgcttgcaactgcgtggtgggctatattggcgaacgctgccagtatcgcgatctgaaatggtgggaactgcgc

SEQ ID NO: 46 - protein, 453 aa, Artificial sequence; identical to SEQ ID NO: 42
  Corynephage omega: DT387(V7SV29A)linkerEGF

SEQ ID NO: 47 - DNA, 1359 bp, Artificial sequence
  Corynephage omega: DT387(V7AV29A)linkerEGF
  CDS (1)..(1359)
atgggcgctgatgatgttgttgattcttctaaatcttttgtgatggaaaacttttcttcgtaccacgggactaaacctggttatgtagattccattcaaaaaggtatacaaaagccaaaatctggtacacaaggaaattatgacgatgattggaaagggttttatagtaccgacaataaatacgacgctgcgggatactctgtagataatgaaaacccgctctctggaaaagctggaggcgtggtcaaagtgacgtatccaggactgacgaaggttctcgcactaaaagtggataatgccgaaactattaagaaagagttaggtttaagtctcactgaaccgttgatggagcaagtcggaacggaggagtttatcaaaaggttcggtgatggtgcttcgcgtgtagtgctcagccttcccttcgctgaggggagttctagcgttgaatatattaataactgggaacaggcgaaagcgttaagcgtagaacttgagattaattttgaaacccgtggaaaacgtggccaagatgcgatgtatgagtatatggctcaagcctgtgcaggaaatcgtgtcaggcgatcagtaggtagctcattgtcatgcatcaacctggattgggatgttatccgtgataaaactaaaactaagatcgaatctctgaaagaacacggtccgatcaaaaacaaaatgagcgaaagcccgaacaaaactgtatctgaagaaaaagctaaacagtacctggaagaattccaccagactgcactggaacacccggaactgtctgaacttaagaccgttactggtaccaacccggtattcgctggtgctaactacgctgcttgggcagtaaacgttgctcaggttatcgatagcgaaactgctgataacctggaaaaaactaccgcggctctgtctatcctgccgggtatcggtagcgtaatgggcatcgcagacggcgccgttcaccacaacactgaagaaatcgttgcacagtctatcgctctgagctctctgatggttgctcaggccatcccgctggtaggtgaactggttgatatcggtttcgctgcatacaacttcgttgaaagcatcatcaacctgttccaggttgttcacaactcttacaaccgcccggcttactctccgggtcacaagacgcatgcatctagcggaggtggctctagcggtggaggatccaacagcgatagcgaatgcccgctgagccatgatggctattgcctgcatgatggcgtgtgcatgtatattgaagcgctggataaatatgcgtgcaactgcgtggtgggctatattggcgaacgctgccagtatcgcgatctgaaatggtgggaactgcgc

SEQ ID NO: 48 - protein, 453 aa, Artificial sequence; identical to SEQ ID NO: 42
  Corynephage omega: DT387(V7AV29A)linkerEGF

SEQ ID NO: 49 - DNA, 1359 bp, Artificial sequence
  Corynephage omega: DT387(D8EV29AD291E)linkerEGF
  CDS (1)..(1359)
atgggcgctgatgatgttgttgattcttctaaatcttttgtgatggaaaacttttcttcgtaccacgggactaaacctggttatgtagattccattcaaaaaggtatacaaaagccaaaatctggtacacaaggaaattatgacgatgattggaaagggttttatagtaccgacaataaatacgacgctgcgggatactctgtagataatgaaaacccgctctctggaaaagctggaggcgtggtcaaagtgacgtatccaggactgacgaaggttctcgcactaaaagtggataatgccgaaactattaagaaagagttaggtttaagtctcactgaaccgttgatggagcaagtcggaacggaagagtttatcaaaaggttcggtgatggtgcttcgcgtgtagtgctcagccttcccttcgctgaggggagttctagcgttgaatatattaataactgggaacaggcgaaagcgttaagcgtagaacttgagattaattttgaaacccgtggaaaacgtggccaagatgcgatgtatgagtatatggctcaagcctgtgcaggaaatcgtgtcaggcgatcagtaggtagctcattgtcatgcatcaacctggattgggatgttatccgtgataaaactaaaactaagatcgaatctctgaaagaacacggtccgatcaaaaacaaaatgagcgaaagcccgaacaaaactgtatctgaagaaaaagctaaacagtacctggaagaattccaccagactgcactggaacacccggaactgtctgaacttaagaccgttactggtaccaccccggtattcgctggtgctaactacgctgcttgggcagtaaacgttgctcaggttatcgatagcgaaactgctgataacctggaaaaaactaccgcggctctgtctatcctgccgggtatcggtagcgtaatgggcatcgcagacggcgccgttcaccacaacactgaagaaatcgttgcacagtctatcgctctgagctctctgatggttgctcaggccatcccgctggtaggtgaactggttgatatcggtttcgctgcatacaacttcgttgaaagcatcatcaacctgttccaggttgttcacaactcttacaaccgcccggcttactctccgggtcacaagacgcatgcatctagcggaggtggctctagcggtggaggatccaacagcgatagcgaatgcccgctgagccatgatggctattgcctgcatgatggcgtgtgcatgtatattgaagcgctggataaatatgcgtgcaactgcgtggtgggctatattggcgaacgctgccagtatcgcgatctgaaatggtgggaactgcgc

SEQ ID NO: 50 - protein, 453 aa, Artificial sequence; identical to SEQ ID NO: 14
  Corynephage omega: DT387(D8EV29AD291E)linkerEGF

SEQ ID NO: 51 - DNA, 1359 bp, Artificial sequence; identical to SEQ ID NO: 41
  Corynephage omega: DT387(D8SV29A)linkerEGF
  CDS (1)..(1359)

SEQ ID NO: 52 - protein, 453 aa, Artificial sequence; identical to SEQ ID NO: 42
  Corynephage omega: DT387(D8SV29A)linkerEGF

SEQ ID NO: 53 - DNA, 1179 bp, Artificial sequence
  Corynephage omega: DT387(V7A)
  CDS (1)..(1179)
atgggcgctgatgatgttgttgattcttctaaatcttttgtgatggaaaacttttcttcgtaccacgggactaaacctggttatgtagattccattcaaaaaggtatacaaaagccaaaatctggtacacaaggaaattatgacgatgattggaaagggttttatagtaccgacaataaatacgacgctgcgggatactctgtagataatgaaaacccgctctctggaaaagctggaggcgtggtcaaagtgacgtatccaggactgacgaaggttctcgcactaaaagtggataatgccgaaactattaagaaagagttaggtttaagtctcactgaaccgttgatggagcaagtcggaacggaagagtttatcaaaaggttcggtgatggtgcttcgcgtgtagtgctcagccttcccttcgctgaggggagttctagcgttgaatatattaataactgggaacaggcgaaagcgttaagcgtagaacttgagattaattttgaaacccgtggaaaacgtggccaagatgcgatgtatgagtatatggctcaagcctgtgcaggaaatcgtgtcaggcgatcagtaggtagctcattgtcatgcatcaacctggattgggatgttatccgtgataaaactaaaactaagatcgaatctctgaaagaacacggtccgatcaaaaacaaaatgagcgaaagcccgaacaaaactgtatctgaagaaaaagctaaacagtacctggaagaattccaccagactgcactggaacacccggaactgtctgaacttaagaccgttactggtaccaacccggtattcgctggtgctaactacgctgcttgggcagtaaacgttgctcaggttatcgatagcgaaactgctgataacctggaaaaaactaccgcggctctgtctatcctgccgggtatcggtagcgtaatgggcatcgcagacggcgccgttcaccacaacactgaagaaatcgttgcacagtctatcgctctgagctctctgatggttgctcaggccatcccgctggtaggtgaactggttgatatcggtttcgctgcatacaacttcgttgaaagcatcatcaacctgttccaggttgttcacaactcttacaaccgcccggcgcatgcatctagcggaggtggctctagcggtggaggctgt

SEQ ID NO: 54 - protein, 393 aa, Artificial sequence
  Corynephage omega: DT387(V7A)
MGADDVVDSSKSFVMENFSSYHGTKPGYVDSIQKGIQKPKSGTQGNYDDDWKGFYSTDNKYDAAGYSVDNENPLSGKAGGVVKVTYPGLTKVLALKVDNAETIKKELGLSLTEPLMEQVGTEEFIKRFGDGASRVVLSLPFAEGSSSVEYINNWEQAKALSVELEINFETRGKRGQDAMYEYMAQACAGNRVRRSVGSSLSCINLDWDVIRDKTKTKIESLKEHGPIKNKMSESPNKTVSEEKAKQYLEEFHQTALEHPELSELKTVTGTNPVFAGANYAAWAVNVAQVIDSETADNLEKTTAALSILPGIGSVMGIADGAVHHNTEEIVAQSIALSSLMVAQAIPLVGELVDIGFAAYNFVESIINLFQVVHNSYNRPAHASSGGGSSGGGC

SEQ ID NO: 55 - DNA, 1179 bp, Artificial sequence
  Corynephage omega: DT387(D8S)
  CDS (1)..(1179)
atgggcgctgatgatgttgttgattcttctaaatcttttgtgatggaaaacttttcttcgtaccacgggactaaacctggttatgtagattccattcaaaaaggtatacaaaagccaaaatctggtacacaaggaaattatgacgatgattggaaagggttttatagtaccgacaataaatacgacgctgcgggatactctgtagataatgaaaacccgctctctggaaaagctggaggcgtggtcaaagtgacgtatccaggactgacgaaggttctcgcactaaaagtggataatgccgaaactattaagaaagagttaggtttaagtctcactgaaccgttgatggagcaagtcggaacggaagagtttatcaaaaggttcggtgatggtgcttcgcgtgtagtgctcagccttcccttcgctgaggggagttctagcgttgaatatattaataactgggaacaggcgaaagcgttaagcgtagaacttgagattaattttgaaacccgtggaaaacgtggccaagaggcgatgtatgagtatatggctcaagcctgtgcaggaaatcgtgtcaggcgatcagtaggtagctcattgtcatgcatcaacctggattgggatgttatccgtgataaaactaaaactaagatcgaatctctgaaagaacacggtccgatcaaaaacaaaatgagcgaaagcccgaacaaaactgtatctgaagaaaaagctaaacagtacctggaagaattccaccagactgcactggaacacccggaactgtctgaacttaagaccgttactggtaccaacccggtattcgctggtgctaactacgctgcttgggcagtaaacgttgctcaggttatcgatagcgaaactgctgataacctggaaaaaactaccgcggctctgtctatcctgccgggtatcggtagcgtaatgggcatcgcagacggcgccgttcaccacaacactgaagaaatcgttgcacagtctatcgctctgagctctctgatggttgctcaggccatcccgctggtaggtgaactggttgatatcggtttcgctgcatacaacttcgttgaaagcatcatcaacctgttccaggttgttcacaactcttacaaccgcccggcgcatgcatctagcggaggtggctctagcggtggaggctgt

SEQ ID NO: 56 - protein, 393 aa, Artificial sequence
  Corynephage omega: DT387(D8S)
MGADDVVDSSKSFVMENFSSYHGTKPGYVDSIQKGIQKPKSGTQGNYDDDWKGFYSTDNKYDAAGYSVDNENPLSGKAGGVVKVTYPGLTKVLALKVDNAETIKKELGLSLTEPLMEQVGTEEFIKRFGDGASRVVLSLPFAEGSSSVEYINNWEQAKALSVELEINFETRGKRGQEAMYEYMAQACAGNRVRRSVGSSLSCINLDWDVIRDKTKTKIESLKEHGPIKNKMSESPNKTVSEEKAKQYLEEFHQTALEHPELSELKTVTGTNPVFAGANYAAWAVNVAQVIDSETADNLEKTTAALSILPGIGSVMGIADGAVHHNTEEIVAQSIALSSLMVAQAIPLVGELVDIGFAAYNFVESIINLFQVVHNSYNRPAHASSGGGSSGGGC

SEQ ID NO: 57 - DNA, 1179 bp, Artificial sequence; identical to SEQ ID NO: 53
  Corynephage omega: DT387(V7S)
  CDS (1)..(1179)

SEQ ID NO: 58 - protein, 393 aa, Artificial sequence; identical to SEQ ID NO: 54
  Corynephage omega: DT387(V7S)

SEQ ID NO: 59 - DNA, 1179 bp, Artificial sequence; identical to SEQ ID NO: 53
  Corynephage omega: DT387(D8E)
  CDS (1)..(1179)

SEQ ID NO: 60 - protein, 393 aa, Artificial sequence; identical to SEQ ID NO: 54
  Corynephage omega: DT387(D8E)

SEQ ID NO: 61 - DNA, 1179 bp, Artificial sequence; identical to SEQ ID NO: 53
  Corynephage omega: DT387(V29A)
  CDS (1)..(1179)

SEQ ID NO: 62 - protein, 393 aa, Artificial sequence; identical to SEQ ID NO: 54
  Corynephage omega: DT387(V29A)

SEQ ID NO: 63 - DNA, 1179 bp, Artificial sequence
  Corynephage omega: DT387(V290A)
  CDS (1)..(1179)
atgggcgctgatgatgttgttgattcttctaaatcttttgtgatggaaaacttttcttcgtaccacgggactaaacctggttatgtagattccattcaaaaaggtatacaaaagccaaaatctggtacacaaggaaattatgacgatgattggaaagggttttatagtaccgacaataaatacgacgctgcgggatactctgtagataatgaaaacccgctctctggaaaagctggaggcgtggtcaaagtgacgtatccaggactgacgaaggttctcgcactaaaagtggataatgccgaaactattaagaaagagttaggtttaagtctcactgaaccgttgatggagcaagtcggaacggaagagtttatcaaaaggttcggtgatggtgcttcgcgtgtagtgctcagccttcccttcgctgaggggagttctagcgttgaatatattaataactgggaacaggcgaaagcgttaagcgtagaacttgagattaattttgaaacccgtggaaaacgtggacaagatgcgatgtatgagtatatggctcaagcctgtgcaggaaatcgtgtcaggcgatcagtaggtagctcattgtcatgcatcaacctggattgggatgttatccgtgataaaactaaaactaagatcgaatctctgaaagaacacggtccgatcaaaaacaaaatgagcgaaagcccgaacaaaactgtatctgaagaaaaagctaaacagtacctggaagaattccaccagactgcactggaacacccggaactgtctgaacttaagaccgttactggtaccaacccggtattcgctggtgctaactacgctgcttgggcagtaaacgttgctcaggttatcgatagcgaaactgctgataacctggaaaaaactaccgcggctctgtctatcctgccgggtatcggtagcgtaatgggcatcgcagacggcgccgttcaccacaacactgaagaaatcgttgcacagtctatcgctctgagctctctgatggttgctcaggccatcccgctggtaggtgaactggttgatatcggtttcgctgcatacaacttcgttgaaagcatcatcaacctgttccaggttgttcacaactcttacaaccgcccggcgcatgcatctagcggaggtggctctagcggtggaggctgt

SEQ ID NO: 64 - protein, 393 aa, Artificial sequence; identical to SEQ ID NO: 54
  Corynephage omega: DT387(V290A)

SEQ ID NO: 65 - DNA, 1179 bp, Artificial sequence; identical to SEQ ID NO: 53
  Corynephage omega: DT387(V291E)
  CDS (1)..(1179)

SEQ ID NO: 66 - protein, 393 aa, Artificial sequence; identical to SEQ ID NO: 54
  Corynephage omega: DT387(V291E)

SEQ ID NO: 67 - DNA, 1179 bp, Artificial sequence; identical to SEQ ID NO: 55
  Corynephage omega: DT387(V7AV29A)
  CDS (1)..(1179)

SEQ ID NO: 68 - protein, 393 aa, Artificial sequence; identical to SEQ ID NO: 56
  Corynephage omega: DT387(V7AV29A)

SEQ ID NO: 69 - DNA, 1179 bp, Artificial sequence; identical to SEQ ID NO: 53
  Corynephage omega: DT387(V7SV29A)
  CDS (1)..(1179)

SEQ ID NO: 70 - protein, 393 aa, Artificial sequence; identical to SEQ ID NO: 54
  Corynephage omega: DT387(V7SV29A)

SEQ ID NO: 71 - DNA, 1179 bp, Artificial sequence; identical to SEQ ID NO: 53
  Corynephage omega: DT387(D8EV29A)
  CDS (1)..(1179)

SEQ ID NO: 72 - protein, 393 aa, Artificial sequence; identical to SEQ ID NO: 54
  Corynephage omega: DT387(D8EV29A)

SEQ ID NO: 73 - DNA, 1179 bp, Artificial; identical to SEQ ID NO: 53
  Corynephage omega: DT387(D8SV29A)
  CDS (1)..(1179)

SEQ ID NO: 74 - protein, 393 aa, Artificial sequence; identical to SEQ ID NO: 54
  Corynephage omega: DT387(D8SV29A)

SEQ ID NO: 75 - DNA, 1167 bp, Artificial sequence
  Corynephage omega: DT387(V29AD291E)
  CDS (1)..(1167)
atgggcgctgatgatgttgttgattcttctaaatcttttgtgatggaaaacttttcttcgtaccacgggactaaacctggttatgcagattccattcaaaaaggtatacaaaagccaaaatctggtacacaaggaaattatgacgatgattggaaagggttttatagtaccgacaataaatacgacgctgcgggatactctgtagataatgaaaacccgctctctggaaaagctggaggcgtggtcaaagtgacgtatccaggactgacgaaggttctcgcactaaaagtggataatgccgaaactattaagaaagagttaggtttaagtctcactgaaccgttgatggagcaagtcggaacggaagagtttatcaaaaggttcggtgatggtgcttcgcgtgtagtgctcagccttcccttcgctgaggggagttctagcgttgaatatattaataactgggaacaggcgaaagcgttaagcgtagaacttgagattaattttgaaacccgtggaaaacgtggccaagatgcgatgtatgagtatatggctcaagcctgtgcaggaaatcgtgtcaggcgatcagtaggtagctcattgtcatgcatcaacctggattgggatgttatccgtgataaaactaaaactaagatcgaatctctgaaagaacacggtccgatcaaaaacaaaatgagcgaaagcccgaacaaaactgtatctgaagaaaaagctaaacagtacctggaagaattccaccagactgcactggaacacccggaactgtctgaacttaagaccgttactggtaccaacccggtattcgctggtgctaactacgctgcttgggcagtaaacgttgctcaggttatcgaaagcgaaactgctgataacctggaaaaaactaccgcggctctgtctatcctgccgggtatcggtagcgtaatgggcatcgcagacggcgccgttcaccacaacactgaagaaatcgttgcacagtctatcgctctgagctctctgatggttgctcaggccatcccgctggtaggtgaactggttgatatcggtttcgctgcatacaacttcgttgaaagcatcatcaacctgttccaggttgttcacaactcttacaaccgcccggcttactctccgggtcacaagacgcatgca

SEQ ID NO: 76 - protein, 389 aa, Artificial sequence
  Corynephage omega: DT387(V29AD291E)
MGADDVVDSSKSFVMENFSSYHGTKPGYADSIQKGIQKPKSGTQGNYDDDWKGFYSTDNKYDAAGYSVDNENPLSGKAGGVVKVTYPGLTKVLALKVDNAETIKKELGLSLTEPLMEQVGTEEFIKRFGDGASRVVLSLPFAEGSSSVEYINNWEQAKALSVELEINFETRGKRGQDAMYEYMAQACAGNRVRRSVGSSLSCINLDWDVIRDKTKTKIESLKEHGPIKNKMSESPNKTVSEEKAKQYLEEFHQTALEHPELSELKTVTGTNPVFAGANYAAWAVNVAQVIESETADNLEKTTAALSILPGIGSVMGIADGAVHHNTEEIVAQSIALSSLMVAQAIPLVGELVDIGFAAYNFVESIINLFQVVHNSYNRPAYSPGHKTHA

SEQ ID NO: 77 - DNA, 1179 bp, Artificial sequence
  Corynephage omega: DT387(V7AV29AI290A)
  CDS (1)..(1179)
atgggcgctgatgatgttgttgattcttctaaatcttttgtgatggaaaacttttcttcgtaccacgggactaaacctggttatgtagattccattcaaaaaggtatacaaaagccaaaatctggtacacaaggaaattatgacgatgattggaaagggttttatagtaccgacaataaatacgacgctgcgggatactctgtagataatgaaaacccgctctctggaaaagctggaggcgtggtcaaagtgacgtatccaggactgacgaaggttctcgcactaaaagtggataatgccgaaactattaagaaagagttaggtttaagtctcactgaaccgttgatggagcaagtcggaacggaagagtttatcaaaaggttcggtgatggtgcttcgcgtgtagtgctcagccttcccttcgctgaggggagttctagcgttgaatatattaataactgggaacaggcgaaagcgttaagcgtagaacttgagattaattttgaaacccgtggaaaacgtggccaagatgcgatgtatgagtatatggctcaagcctgtgcaggaaatcgtgtcaggcgatcagtaggtagctcattgtcatgcatcaacctggattgggatgttatccgtgataaaactaaaactaagatcgaatctctgaaagaacacggtccgatcaaaaacaaaatgagcgaaagcccgaacaaaactgtatctgaagaaaaagctaaacagtacctggaagaattccaccagactgcactggaacacccggaactgtctgaacttaagaccgttactggtaccaacccggtattcgctggtgctaactacgctgcttgggcagtaaacgttgctcacgttatcgatagcgaaactgctgataacctggaaaaaactaccgcggctctgtctatcctgccgggtatcggtagcgtaatgggcatcgcagacggcgccgttcaccacaacactgaagaaatcgttgcacagtctatcgctctgagctctctgatggttgctcaggccatcccgctggtaggtgaactggttgatatcggtttcgctgcatacaacttcgttgaaagcatcatcaacctgttccaggttgttcacaactcttacaaccgcccggcgcatgcatctagcggaggtggctctagcggtggaggctgt

SEQ ID NO: 78 - protein, 393 aa, Artificial sequence
  Corynephage omega: DT387(V7AV29AI290A)
MGADDVVDSSKSFVMENFSSYHGTKPGYVDSIQKGIQKPKSGTQGNYDDDWKGFYSTDNKYDAAGYSVDNENPLSGKAGGVVKVTYPGLTKVLALKVDNAETIKKELGLSLTEPLMEQVGTEEFIKRFGDGASRVVLSLPFAEGSSSVEYINNWEQAKALSVELEINFETRGKRGQDAMYEYMAQACAGNRVRRSVGSSLSCINLDWDVIRDKTKTKIESLKEHGPIKNKMSESPNKTVSEEKAKQYLEEFHQTALEHPELSELKTVTGTNPVFAGANYAAWAVNVAHVIDSETADNLEKTTAALSILPGIGSVMGIADGAVHHNTEEIVAQSIALSSLMVAQAIPLVGELVDIGFAAYNFVESIINLFQVVHNSYNRPAHASSGGGSSGGGC

SEQ ID NO: 79 - DNA, 1179 bp, Artificial sequence; identical to SEQ ID NO: 53
  Corynephage omega: DT387(V7AV29AD291E)
  CDS (1)..(1179)

SEQ ID NO: 80 - protein, 393 aa, Artificial sequence; identical to SEQ ID NO: 54
  Corynephage omega: DT387(V7AV29AD291E)

SEQ ID NO: 81 - DNA, 1602 bp, Artificial sequence; identical to SEQ ID NO: 17
  Corynephage omega: DT387(V7SV29A)linkerIL2
  CDS (1)..(1602)

SEQ ID NO: 82 - protein, 534 aa, Artificial sequence; identical to SEQ ID NO: 18
  Corynephage omega: DT387(V7SV29A)linkerIL2

SEQ ID NO: 83 - DNA, 1602 bp, Artificial sequence
  Corynephage omega: DT387(D8EV29AlinkerIL2
  CDS (1)..(1602)
atgggcgctgatgatgttgttgattcttctaaatcttttgtgatggaaaacttttcttcgtaccacgggactaaacctggttatgtagattccattcaaaaaggtatacaaaagccaaaatctggtacacaaggaaattatgacgatgattggaaagggttttatagtaccgacaataaatacgacgctgcgggatactctgtagtaaatgaaaacccgctctctggaaaagctggaggcgtggtcaaagtgacgtatccaggactgacgaaggttctcgcactaaaagtggataatgccgaaactattaagaaagagttaggtttaagtctcactgaaccgttgatggagcaagtcgaaacggaagagtttatcaaaaggttcggtgatggtgcttcgcgtgtagtgctcagccttcccttcgctgaggggagttctagcgttgaatatattaataactgggaacaggcgaaagcgttaagcgtagaacttgagattaattttgaaacccgtggaaaacgtggccaagatgcgatgtatgattatatggctcaagcctgtgcaggaaatcgtgtcaggcgatcagtaggtagctcattgtcatgcatcaacctggattgggatgttatccgtgataaaactaaaactaagatcgaatctctgaaagaacacggtccgatcaaaaacaaaatgagcgaaagcccgaacaaaactgtatctgaagaaaaagctaaacagtacctggaagaattccaccagactgcactggaacacccggaactgtctgaacttaagaccgttactggtaccaacccggtattcgctggtgctaactacgctgcttgggcagtaaacgttgctcaggttatcgatagcgaaactgctgataacctggaaaaaactaccgcggctctgtctatcctgccgggtatcggtagcgtaatgggcatcgcagacggcgccgttcaccacaacactgaagaaatcgttgcacagtctatcgctctgagctctctgatggttgctcaggccatcccgctggtaggtgaactggttgatatcggtttcgctgcatacaacttcgttgaaagcatcatcaacctgttccaggttgttcacaactcttacaaccgcccggcttactctccgggtcacaagacgcatgcatctagcggaggtggctctagcggtggaggatccgcacctacttctagctctaccaagaaaacccagctgcagctcgagcacctgctgctggatttgcagatgatcctgaacggtatcaacaattacaagaacccgaaactgacgcgtatgctgaccttcaagttctacatgccgaagaaggccaccgaactgaaacacctgctgcagtgtctagaagaagaactgaaaccgctggaggaagttctgaacctggctcagtctaaaaacttccacctgcggccgcgtgacctgatctctaacatcaacgtaatcgttctggaactgaagggctctgaaaccaccttcatgtgtgaatacgctgatgagaccgcaaccatcgtagaattcctgaaccgttggatcaccttctgtcagtctatcatctctaccctgacc

SEQ ID NO: 84 - protein, 534 aa, Artificial sequence [sequence omitted]

SEQ ID NO: 85 - DNA, 1164 bp, Artificial sequence
  Corynephage omega: DT387(AD8)
  CDS (1)..(1164)
atgggcgctgatgatgttgtttcttctaaatcttttgtgatggaaaacttttcttcgtaccacgggactaaacctggttatgtagattccattcaaaaaggtatacaaaagccaaaatctggtacacaaggaaattatgacgatgattggaaagggttttatagtaccgacaataaatacgacgctgcgggatactctgtagataatgaaaacccgctctctggaaaagctggaggcgtggtcaaagtgacgtatccaggactgacgaaggttctcgcactaaaagtggataatgccgaaactattaagaaagagttaggtttaagtctcactgaaccgttgatggagcaagtcggaacggaagagtttatcaaaaggttcggtgatggtgcttcgcgtgtagtgctcagccttcccttcgctgaggggagttctagcgttgaatatattaataactgggaacaggcgaaagcgttaagcgtagaacttgagattaattttgaaacccgtggaaaacgtggccaagatgcgatgtatgagtatatggctcaagcctgtgcaggaaatcgtgtcaggcgatcagtaggtagctcattgtcatgcatcaacctggattgggatgttatccgtgataaaactaaaactaagatcgaatctctgaaagaacacggtccgatcaaaaacaaaatgagcgaaagcccgaacaaaactgtatctgaagaaaaagctaaacagtacctggaagaattccaccagactgcactggaacacccggaactgtctgaacttaagaccgttactggtaccaacccggtattcgctggtgctaactacgctgcttgggcagtaaacgttgctcaggttatcgatagcgaaactgctgataacctggaaaaaactaccgcggctctgtctatcctgccgggtatcggtagcgtaatgggcatcgcagacggcgccgttcaccacaacactgaagaaatcgttgcacagtctatcgctctgagctctctgatggttgctcaggccatcccgctggtaggtgaactggttgatatcggtttcgctgcatacaacttcgttgaaagcatcatcaacctgttccaggttgttcacaactcttacaaccgcccggcttactctccgggtcacaagacgcatgca

SEQ ID NO: 86 - protein, 388 aa, Artificial sequence
  Corynephage omega: DT387(AD8)
MGADDVVSSKSFVMENFSSYHGTKPGYVDSIQKGIQKPKSGTQGNYDDDWKGFYSTDNKYDAAGYSVDNENPLSGKAGGVVKVTYPGLTKVLALKVDNAETIKKELGLSLTEPLMEQVGTEEFIKRFGDGASRVVLSLPFAEGSSSVEYINNWEQAKALSVELEINFETRGKRGQDAMYEYMAQACAGNRVRRSVGSSLSCINLDWDVIRDKTKTKIESLKEHGPIKNKMSESPNKTVSEEKAKQYLEEFHQTALEHPELSELKTVTGTNPVFAGANYAAWAVNVAQVIDSETADNLEKTTAALSILPGIGSVMGIADGAVHHNTEEIVAQSIALSSLMVAQAIPLVGELVDIGFAAYNFVESIINLFQVVHNSYNRPAYSPGHKTHA

SEQ ID NO: 87 - DNA, 1179 bp, Artificial sequence; identical to SEQ ID NO: 53
  Corynephage omega: DT380gsC
  CDS (1)..(1179)

SEQ ID NO: 88 - protein, 393 aa, Artificial sequence; identical to SEQ ID NO: 54
  Corynephage omega: DT380gsC

SEQ ID NO: 89 - DNA, 1566 bp, Artificial sequence
  Corynephage omega: DT387(V7A)IL2
  CDS (1)..(1566)
atgggcgctgatgatgttgctgattcttctaaatcttttgtgatggaaaacttttcttcgtaccacgggactaaacctggttatgtagattccattcaaaaaggtatacaaaagccaaaatctggtacacaaggaaattatgacgatgattggaaagggttttatagtaccgacaataaatacgacgctgcgggatactctgtagataatgaaaacccgctctctggaaaagctggaggcgtggtcaaagtgacgtatccaggactgacgaaggttctcgcactaaaagtggataatgccgaaactattaagaaagagttaggtttaagtctcactgaaccgttgatggagcaagtcggaacggaagagtttatcaaaaggttcggtgatggtgcttcgcgtgtagtgctcagccttcccttcgctgaggggagttctagcgttgaatatattaataactgggaacaggcgaaagcgttaagcgtagaacttgagattaattttgaaacccgtggaaaacgtggccaagatgcgatgtatgagtatatggctcaagcctgtgcaggaaatcgtgtcaggcgatcagtaggtagctcattgtcatgcatcaacctggattgggatgttatccgtgataaaactaaaactaagatcgaatctctgaaagaacacggtccgatcaaaaacaaaatgagcgaaagcccgaacaaaactgtatctgaagaaaaagctaaacagtacctggaagaattccaccagactgcactggaacacccggaactgtctgaacttaagaccgttactggtaccaacccggtattcgctggtgctaactacgctgcttgggcagtaaacgttgctcaggttatcgatagcgaaactgctgataacctggaaaaaactaccgcggctctgtctatcctgccgggtatcggtagcgtaatgggcatcgcagacggcgccgttcaccacaacactgaagaaatcgttgcacagtctatcgctctgagctctctgatggttgctcaggccatcccgctggtaggtgaactggttgatatcggtttcgctgcatacaacttcgttgaaagcatcatcaacctgttccaggttgttcacaactcttacaaccgcccggcttactctccgggtcacaagacgcatgcacctacttctagctctaccaagaaaacccagctgcagctcgagcacctgctgctggatttgcagatgatcctgaacggtatcaacaattacaagaacccgaaactgacgcgtatgctgaccttcaagttctacatgccgaagaaggccaccgaactgaaacacctgctgcagtgtctagaagaagaactgaaaccgctggaggaagttctgaacctggctcagtctaaaaacttccacctgcggccgcgtgacctgatctctaacatcaacgtaatcgttctggaactgaagggctctgaaaccaccttcatgtgtgaatacgctgatgagaccgcaaccatcgtagaattcctgaaccgttggatcaccttctgtcagtctatcatctctaccctgacc

SEQ ID NO: 90 - protein, 522 aa, Artificial sequence
  Corynephage omega: DT387(V7A)IL2
MGADDVADSSKSFVMENFSSYHGTKPGYVDSIQKGIQKPKSGTQGNYDDDWKGFYSTDNKYDAAGYSVDNENPLSGKAGGVVKVTYPGLTKVLALKVDNAETIKKELGLSLTEPLMEQVGTEEFIKRFGDGASRVVLSLPFAEGSSSVEYINNWEQAKALSVELEINFETRGKRGQDAMYEYMAQACAGNRVRRSVGSSLSCINLDWDVIRDKTKTKIESLKEHGPIKNKMSESPNKTVSEEKAKQYLEEFHQTALEHPELSELKTVTGTNPVFAGANYAAWAVNVAQVIDSETADNLEKTTAALSILPGIGSVMGIADGAVHHNTEEIVAQSIALSSLMVAQAIPLVGELVDIGFAAYNFVESIINLFQVVHNSYNRPAYSPGHKTHAPTSSSTKKTQLQLEHLLLDLQMILNGINNYKNPKLTRMLTFKFYMPKKATELKHLLQCLEEELKPLEEVLNLAQSKNFHLRPRDLISNINVIVLELKGSETTFMCEYADETATIVEFLNRWITFCQSIISTLT

SEQ ID NO: 91 - DNA, 1566 bp, Artificial sequence
  Corynephage omega: DT387(D8S)IL2
  CDS (1)..(1566)
atgggcgctgatgatgttgtttcttcttctaaatcttttgtgatggaaaacttttcttcgtaccacgggactaaacctggttatgtagattccattcaaaaaggtatacaaaagccaaaatctggtacacaaggaaattatgacgatgattggaaagggttttatagtaccgacaataaatacgacgctgcgggatactctgtagataatgaaaacccgctctctggaaaagctggaggcgtggtcaaagtgacgtatccaggactgacgaaggttctcgcactaaaagtggataatgccgaaactattaagaaagagttaggtttaagtctcactgaaccgttgatggagcaagtcggaacggaagagtttatcaaaaggttcggtgatggtgcttcgcgtgtagtgctcagccttcccttcgctgaggggagttctagcgttgaatatattaataactgggaacaggcgaaagcgttaagcgtagaacttgagattaattttgaaacccgtggaaaacgtggccaagatgcgatgtatgagtatatggctcaagcctgtgcaggaaatcgtgtcaggcgatcagtaggtagctcattgtcatgcatcaacctggattgggatgttatccgtgataaaactaaaactaagatcgaatctctgaaagaacacggtccgatcaaaaacaaaatgagcgaaagcccgaacaaaactgtatctgaagaaaaagctaaacagtacctggaagaattccaccagactgcactggaacacccggaactgtctgaacttaagaccgttactggtaccaacccggtattcgctggtgctaactacgctgcttgggcagtaaacgttgctcaggttatcgatagcgaaactgctgataacctggaaaaaactaccgcggctctgtctatcctgccgggtatcggtagcgtaatgggcatcgcagacggcgccgttcaccacaacactgaagaaatcgttgcacagtctatcgctctgagctctctgatggttgctcaggccatcccgctggtaggtgaactggttgatatcggtttcgctgcatacaacttcgttgaaagcatcatcaacctgttccaggttgttcacaactcttacaaccgcccggcttactctccgggtcacaagacgcatgcacctacttctagctctaccaagaaaacccagctgcagctcgagcacctgctgctggatttgcagatgatcctgaacggtatcaacaattacaagaacccgaaactgacgcgtatgctgaccttcaagttctacatgccgaagaaggccaccgaactgaaacacctgctgcagtgtctagaagaagaactgaaaccgctggaggaagttctgaacctggctcagtctaaaaacttccacctgcggccgcgtgacctgatctctaacatcaacgtaatcgttctggaactgaagggctctgaaaccaccttcatgtgtgaatacgctgatgagaccgcaaccatcgtagaattcctgaaccgttggatcaccttctgtcagtctatcatctctaccctgacc

SEQ ID NO: 92 - protein, 522 aa, Artificial sequence
  Corynephage omega: DT387(D8S)IL2
MGADDVVSSSKSFVMENFSSYHGTKPGYVDSIQKGIQKPKSGTQGNYDDDWKGFYSTDNKYDAAGYSVDNENPLSGKAGGVVKVTYPGLTKVLALKVDNAETIKKELGLSLTEPLMEQVGTEEFIKRFGDGASRVVLSLPFAEGSSSVEYINNWEQAKALSVELEINFETRGKRGQDAMYEYMAQACAGNRVRRSVGSSLSCINLDWDVIRDKTKTKIESLKEHGPIKNKMSESPNKTVSEEKAKQYLEEFHQTALEHPELSELKTVTGTNPVFAGANYAAWAVNVAQVIDSETADNLEKTTAALSILPGIGSVMGIADGAVHHNTEEIVAQSIALSSLMVAQAIPLVGELVDIGFAAYNFVESIINLFQVVHNSYNRPAYSPGHKTHAPTSSSTKKTQLQLEHLLLDLQMILNGINNYKNPKLTRMLTFKFYMPKKATELKHLLQCLEEELKPLEEVLNLAQSKNFHLRPRDLISNINVIVLELKGSETTFMCEYADETATIVEFLNRWITFCQSIISTLT

SEQ ID NO: 93 - DNA, 1566 bp, Artificial sequence
  Corynephage omega: DT387(D8E)IL2
  CDS (1)..(1566)
atgggcgctgatgatgttgttgaatcttctaaatcttttgtgatggaaaacttttcttcgtaccacgggactaaacctggttatgtagattccattcaaaaaggtatacaaaagccaaaatctggtacacaaggaaattatgacgatgattggaaagggttttatagtaccgacaataaatacgacgctgcgggatactctgtagataatgaaaacccgctctctggaaaagctggaggcgtggtcaaagtgacgtatccaggactgacgaaggttctcgcactaaaagtggataatgccgaaactattaagaaagagttaggtttaagtctcactgaaccgttgatggagcaagtcggaacggaagagtttatcaaaaggttcggtgatggtgcttcgcgtgtagtgctcagccttcccttcgctgaggggagttctagcgttgaatatattaataactgggaacaggcgaaagcgttaagcgtagaacttgagattaattttgaaacccgtggaaaacgtggccaagatgcgatgtatgagtatatggctcaagcctgtgcaggaaatcgtgtcaggcgatcagtaggtagctcattgtcatgcatcaacctggattgggatgttatccgtgataaaactaaaactaagatcgaatctctgaaagaacacggtccgatcaaaaacaaaatgagcgaaagcccgaacaaaactgtatctgaagaaaaagctaaacagtacctggaagaattccaccagactgcactggaacacccggaactgtctgaacttaagaccgttactggtaccaacccggtattcgctggtgctaactacgctgcttgggcagtaaacgttgctcaggttatcgatagcgaaactgctgataacctggaaaaaactaccgcggctctgtctatcctgccgggtatcggtagcgtaatgggcatcgcagacggcgccgttcaccacaacactgaagaaatcgttgcacagtctatcgctctgagctctctgatggttgctcaggccatcccgctggtaggtgaactggttgatatcggtttcgctgcatacaacttcgttgaaagcatcatcaacctgttccaggttgttcacaactcttacaaccgcccggcttactctccgggtcacaagacgcatgcacctacttctagctctaccaagaaaacccagctgcagctcgagcacctgctgctggatttgcagatgatcctgaacggtatcaacaattacaagaacccgaaactgacgcgtatgctgaccttcaagttctacatgccgaagaaggccaccgaactgaaacacctgctgcagtgtctagaagaagaactgaaaccgctggaggaagttctgaacctggctcagtctaaaaacttccacctgcggccgcgtgacctgatctctaacatcaacgtaatcgttctggaactgaagggctctgaaaccaccttcatgtgtgaatacgctgatgagaccgcaaccatcgtagaattcctgaaccgttggatcaccttctgtcagtctatcatctctaccctgacc

SEQ ID NO: 94 - protein, 522 aa, Artificial sequence
  Corynephage omega: DT387(D8E)IL2
MGADDVVESSKSFVMENFSSYHGTKPGYVDSIQKGIQKPKSGTQGNYDDDWKGFYSTDNKYDAAGYSVDNENPLSGKAGGVVKVTYPGLTKVLALKVDNAETIKKELGLSLTEPLMEQVGTEEFIKRFGDGASRVVLSLPFAEGSSSVEYINNWEQAKALSVELEINFETRGKRGQDAMYEYMAQACAGNRVRRSVGSSLSCINLDWDVIRDKTKTKIESLKEHGPIKNKMSESPNKTVSEEKAKQYLEEFHQTALEHPELSELKTVTGTNPVFAGANYAAWAVNVAQVIDSETADNLEKTTAALSILPGIGSVMGIADGAVHHNTEEIVAQSIALSSLMVAQAIPLVGELVDIGFAAYNFVESIINLFQVVHNSYNRPAYSPGHKTHAPTSSSTKKTQLQLEHLLLDLQMILNGINNYKNPKLTRMLTFKFYMPKKATELKHLLQCLEEELKPLEEVLNLAQSKNFHLRPRDLISNINVIVLELKGSETTFMCEYADETATIVEFLNRWITFCQSIISTLT

SEQ ID NO: 95 - DNA, 1566 bp, Artificial sequence
  Corynephage omega: DT387(V29A)IL2
  CDS (1)..(1566)
atgggcgctgatgatgttgttgattcttctaaatcttttgtgatggaaaacttttcttcgtaccacgggactaaacctggttatgcagattccattcaaaaaggtatacaaaagccaaaatctggtacacaaggaaattatgacgatgattggaaagggttttatagtaccgacaataaatacgacgctgcgggatactctgtagataatgaaaacccgctctctggaaaagctggaggcgtggtcaaagtgacgtatccaggactgacgaaggttctcgcactaaaagtggataatgccgaaactattaagaaagagttaggtttaagtctcactgaaccgttgatggagcaagtcggaacggaagagtttatcaaaaggttcggtgatggtgcttcgcgtgtagtgctcagccttcccttcgctgaggggagttctagcgttgaatatattaataactgggaacaggcgaaagcgttaagcgtagaacttgagattaattttgaaacccgtggaaaacgtggccaagatgcgatgtatgagtatatggctcaagcctgtgcaggaaatcgtgtcaggcgatcagtaggtagctcattgtcatgcatcaacctggattgggatgttatccgtgataaaactaaaactaagatcgaatctctgaaagaacacggtccgatcaaaaacaaaatgagcgaaagcccgaacaaaactgtatctgaagaaaaagctaaacagtacctggaagaattccaccagactgcactggaacacccggaactgtctgaacttaagaccgttactggtaccaacccggtattcgctggtgctaactacgctgcttgggcagtaaacgttgctcaggttatcgatagcgaaactgctgataacctggaaaaaactaccgcggctctgtctatcctgccgggtatcggtagcgtaatgggcatcgcagacggcgccgttcaccacaacactgaagaaatcgttgcacagtctatcgctctgagctctctgatggttgctcaggccatcccgctggtaggtgaactggttgatatcggtttcgctgcatacaacttcgttgaaagcatcatcaacctgttccaggttgttcacaactcttacaaccgcccggcttactctccgggtcacaagacgcatgcacctacttctagctctaccaagaaaacccagctgcagctcgagcacctgctgctggatttgcagatgatcctgaacggtatcaacaattacaagaacccgaaactgacgcgtatgctgaccttcaagttctacatgccgaagaaggccaccgaactgaaacacctgctgcagtgtctagaagaagaactgaaaccgctggaggaagttctgaacctggctcagtctaaaaacttccacctgcggccgcgtgacctgatctctaacatcaacgtaatcgttctggaactgaagggctctgaaaccaccttcatgtgtgaatacgctgatgagaccgcaaccatcgtagaattcctgaaccgttggatcaccttctgtcagtctatcatctctaccctgacc

SEQ ID NO: 96 - protein, 522 aa, Artificial sequence
  Corynephage omega: DT387(V29A)IL2
MGADDVVDSSKSFVMENFSSYHGTKPGYADSIQKGIQKPKSGTQGNYDDDWKGFYSTDNKYDAAGYSVDNENPLSGKAGGVVKVTYPGLTKVLALKVDNAETIKKELGLSLTEPLMEQVGTEEFIKRFGDGASRVVLSLPFAEGSSSVEYINNWEQAKALSVELEINFETRGKRGQDAMYEYMAQACAGNRVRRSVGSSLSCINLDWDVIRDKTKTKIESLKEHGPIKNKMSESPNKTVSEEKAKQYLEEFHQTALEHPELSELKTVTGTNPVFAGANYAAWAVNVAQVIDSETADNLEKTTAALSILPGIGSVMGIADGAVHHNTEEIVAQSIALSSLMVAQAIPLVGELVDIGFAAYNFVESIINLFQVVHNSYNRPAYSPGHKTHAPTSSSTKKTQLQLEHLLLDLQMILNGINNYKNPKLTRMLTFKFYMPKKATELKHLLQCLEEELKPLEEVLNLAQSKNFHLRPRDLISNINVIVLELKGSETTFMCEYADETATIVEFLNRWITFCQSIISTLT

SEQ ID NO: 97 - DNA, 1566 bp, Artificial sequence
  Corynephage omega: DT387(I290A)IL2
  CDS (1)..(1566)
atgggcgctgatgatgttgttgattcttctaaatcttttgtgatggaaaacttttcttcgtaccacgggactaaacctggttatgtagattccattcaaaaaggtatacaaaagccaaaatctggtacacaaggaaattatgacgatgattggaaagggttttatagtaccgacaataaatacgacgctgcgggatactctgtagataatgaaaacccgctctctggaaaagctggaggcgtggtcaaagtgacgtatccaggactgacgaaggttctcgcactaaaagtggataatgccgaaactattaagaaagagttaggtttaagtctcactgaaccgttgatggagcaagtcggaacggaagagtttatcaaaaggttcggtgatggtgcttcgcgtgtagtgctcagccttcccttcgctgaggggagttctagcgttgaatatattaataactgggaacaggcgaaagcgttaagcgtagaacttgagattaattttgaaacccgtggaaaacgtggccaagatgcgatgtatgagtatatggctcaagcctgtgcaggaaatcgtgtcaggcgatcagtaggtagctcattgtcatgcatcaacctggattgggatgttatccgtgataaaactaaaactaagatcgaatctctgaaagaacacggtccgatcaaaaacaaaatgagcgaaagcccgaacaaaactgtatctgaagaaaaagctaaacagtacctggaagaattccaccagactgcactggaacacccggaactgtctgaacttaagaccgttactggtaccaacccggtattcgctggtgctaactacgctgcttgggcagtaaacgttgctcaggttgcagatagcgaaactgctgataacctggaaaaaactaccgcggctctgtctatcctgccgggtatcggtagcgtaatgggcatcgcagacggcgccgttcaccacaacactgaagaaatcgttgcacagtctatcgctctgagctctctgatggttgctcaggccatcccgctggtaggtgaactggttgatatcggtttcgctgcatacaacttcgttgaaagcatcatcaacctgttccaggttgttcacaactcttacaaccgcccggcttactctccgggtcacaagacgcatgcacctacttctagctctaccaagaaaacccagctgcagctcgagcacctgctgctggatttgcagatgatcctgaacggtatcaacaattacaagaacccgaaactgacgcgtatgctgaccttcaagttctacatgccgaagaaggccaccgaactgaaacacctgctgcagtgtctagaagaagaactgaaaccgctggaggaagttctgaacctggctcagtctaaaaacttccacctgcggccgcgtgacctgatctctaacatcaacgtaatcgttctggaactgaagggctctgaaaccaccttcatgtgtgaatacgctgatgagaccgcaaccatcgtagaattcctgaaccgttggatcaccttctgtcagtctatcatctctaccctgacc

SEQ ID NO: 98 - protein, 522 aa, Artificial sequence
  Corynephage omega: DT387(I290A)IL2
MGADDVVDSSKSFVMENFSSYHGTKPGYVDSIQKGIQKPKSGTQGNYDDDWKGFYSTDNKYDAAGYSVDNENPLSGKAGGVVKVTYPGLTKVLALKVDNAETIKKELGLSLTEPLMEQVGTEEFIKRFGDGASRVVLSLPFAEGSSSVEYINNWEQAKALSVELEINFETRGKRGQDAMYEYMAQACAGNRVRRSVGSSLSCINLDWDVIRDKTKTKIESLKEHGPIKNKMSESPNKTVSEEKAKQYLEEFHQTALEHPELSELKTVTGTNPVFAGANYAAWAVNVAQVADSETADNLEKTTAALSILPGIGSVMGIADGAVHHNTEEIVAQSIALSSLMVAQAIPLVGELVDIGFAAYNFVESIINLFQVVHNSYNRPAYSPGHKTHAPTSSSTKKTQLQLEHLLLDLQMILNGINNYKNPKLTRMLTFKFYMPKKATELKHLLQCLEEELKPLEEVLNLAQSKNFHLRPRDLISNINVIVLELKGSETTFMCEYADETATIVEFLNRWITFCQSIISTLT

SEQ ID NO: 99 - DNA, 1566 bp, Artificial sequence
  Corynephage omega: DT387(D291E)IL2
  CDS (1)..(1566)
atgggcgctgatgatgttgttgattcttctaaatcttttgtgatggaaaacttttcttcgtaccacgggactaaacctggttatgtagattccattcaaaaaggtatacaaaagccaaaatctggtacacaaggaaattatgacgatgattggaaagggttttatagtaccgacaataaatacgacgctgcgggatactctgtagataatgaaaacccgctctctggaaaagctggaggcgtggtcaaagtgacgtatccaggactgacgaaggttctcgcactaaaagtggataatgccgaaactattaagaaagagttaggtttaagtctcactgaaccgttgatggagcaagtcggaacggaagagtttatcaaaaggttcggtgatggtgcttcgcgtgtagtgctcagccttcccttcgctgaggggagttctagcgttgaatatattaataactgggaacaggcgaaagcgttaagcgtagaacttgagattaattttgaaacccgtggaaaacgtggccaagatgcgatgtatgagtatatggctcaagcctgtgcaggaaatcgtgtcaggcgatcagtaggtagctcattgtcatgcatcaacctggattgggatgttatccgtgataaaactaaaactaagatcgaatctctgaaagaacacggtccgatcaaaaacaaaatgagcgaaagcccgaacaaaactgtatctgaagaaaaagctaaacagtacctggaagaattccaccagactgcactggaacacccggaactgtctgaacttaagaccgttactggtaccaacccggtattcgctggtgctaactacgctgcttgggcagtaaacgttgctcaggttatcgaaagcgaaactgctgataacctggaaaaaactaccgcggctctgtctatcctgccgggtatcggtagcgtaatgggcatcgcagacggcgccgttcaccacaacactgaagaaatcgttgcacagtctatcgctctgagctctctgatggttgctcaggccatcccgctggtaggtgaactggttgatatcggtttcgctgcatacaacttcgttgaaagcatcatcaacctgttccaggttgttcacaactcttacaaccgcccggcttactctccgggtcacaagacgcatgcacctacttctagctctaccaagaaaacccagctgcagctcgagcacctgctgctggatttgcagatgatcctgaacggtatcaacaattacaagaacccgaaactgacgcgtatgctgaccttcaagttctacatgccgaagaaggccaccgaactgaaacacctgctgcagtgtctagaagaagaactgaaaccgctggaggaagttctgaacctggctcagtctaaaaacttccacctgcggccgcgtgacctgatctctaacatcaacgtaatcgttctggaactgaagggctctgaaaccaccttcatgtgtgaatacgctgatgagaccgcaaccatcgtagaattcctgaaccgttggatcaccttctgtcagtctatcatctctaccctgacc

SEQ ID NO: 100 - protein, 522 aa, Artificial sequence
  Corynephage omega: DT387(D291E)IL2
MGADDVVDSSKSFVMENFSSYHGTKPGYVDSIQKGIQKPKSGTQGNYDDDWKGFYSTDNKYDAAGYSVDNENPLSGKAGGVVKVTYPGLTKVLALKVDNAETIKKELGLSLTEPLMEQVGTEEFIKRFGDGASRVVLSLPFAEGSSSVEYINNWEQAKALSVELEINFETRGKRGQDAMYEYMAQACAGNRVRRSVGSSLSCINLDWDVIRDKTKTKIESLKEHGPIKNKMSESPNKTVSEEKAKQYLEEFHQTALEHPELSELKTVTGTNPVFAGANYAAWAVNVAQVIESETADNLEKTTAALSILPGIGSVMGIADGAVHHNTEEIVAQSIALSSLMVAQAIPLVGELVDIGFAAYNFVESIINLFQVVHNSYNRPAYSPGHKTHAPTSSSTKKTQLQLEHLLLDLQMILNGINNYKNPKLTRMLTFKFYMPKKATELKHLLQCLEEELKPLEEVLNLAQSKNFHLRPRDLISNINVIVLELKGSETTFMCEYADETATIVEFLNRWITFCQSIISTLT

SEQ ID NO: 101 - DNA, 1566 bp, Artificial sequence
  Corynephage omega: DT387(V7AV29A)IL2
  CDS (1)..(1566)
atgggcgctgatgatgttgctgattcttctaaatcttttgtgatggaaaacttttcttcgtaccacgggactaaacctggttatgcagattccattcaaaaaggtatacaaaagccaaaatctggtacacaaggaaattatgacgatgattggaaagggttttatagtaccgacaataaatacgacgctgcgggatactctgtagataatgaaaacccgctctctggaaaagctggaggcgtggtcaaagtgacgtatccaggactgacgaaggttctcgcactaaaagtggataatgccgaaactattaagaaagagttaggtttaagtctcactgaaccgttgatggagcaagtcggaacggaagagtttatcaaaaggttcggtgatggtgcttcgcgtgtagtgctcagccttcccttcgctgaggggagttctagcgttgaatatattaataactgggaacaggcgaaagcgttaagcgtagaacttgagattaattttgaaacccgtggaaaacgtggccaagatgcgatgtatgagtatatggctcaagcctgtgcaggaaatcgtgtcaggcgatcagtaggtagctcattgtcatgcatcaacctggattgggatgttatccgtgataaaactaaaactaagatcgaatctctgaaagaacacggtccgatcaaaaacaaaatgagcgaaagcccgaacaaaactgtatctgaagaaaaagctaaacagtacctggaagaattccaccagactgcactggaacacccggaactgtctgaacttaagaccgttactggtaccaacccggtattcgctggtgctaactacgctgcttgggcagtaaacgttgctcaggttatcgatagcgaaactgctgataacctggaaaaaactaccgcggctctgtctatcctgccgggtatcggtagcgtaatgggcatcgcagacggcgccgttcaccacaacactgaagaaatcgttgcacagtctatcgctctgagctctctgatggttgctcaggccatcccgctggtaggtgaactggttgatatcggtttcgctgcatacaacttcgttgaaagcatcatcaacctgttccaggttgttcacaactcttacaaccgcccggcttactctccgggtcacaagacgcatgcacctacttctagctctaccaagaaaacccagctgcagctcgagcacctgctgctggatttgcagatgatcctgaacggtatcaacaattacaagaacccgaaactgacgcgtatgctgaccttcaagttctacatgccgaagaaggccaccgaactgaaacacctgctgcagtgtctagaagaagaactgaaaccgctggaggaagttctgaacctggctcagtctaaaaacttccacctgcggccgcgtgacctgatctctaacatcaacgtaatcgttctggaactgaagggctctgaaaccaccttcatgtgtgaatacgctgatgagaccgcaaccatcgtagaattcctgaaccgttggatcaccttctgtcagtctatcatctctaccctgacc

SEQ ID NO: 102 - protein, 522 aa, Artificial sequence
  Corynephage omega: DT387(V7AV29A)IL2
MGADDVADSSKSFVMENFSSYHGTKPGYADSIQKGIQKPKSGTQGNYDDDWKGFYSTDNKYDAAGYSVDNENPLSGKAGGVVKVTYPGLTKVLALKVDNAETIKKELGLSLTEPLMEQVGTEEFIKRFGDGASRVVLSLPFAEGSSSVEYINNWEQAKALSVELEINFETRGKRGQDAMYEYMAQACAGNRVRRSVGSSLSCINLDWDVIRDKTKTKIESLKEHGPIKNKMSESPNKTVSEEKAKQYLEEFHQTALEHPELSELKTVTGTNPVFAGANYAAWAVNVAQVIDSETADNLEKTTAALSILPGIGSVMGIADGAVHHNTEEIVAQSIALSSLMVAQAIPLVGELVDIGFAAYNFVESIINLFQVVHNSYNRPAYSPGHKTHAPTSSSTKKTQLQLEHLLLDLQMILNGINNYKNPKLTRMLTFKFYMPKKATELKHLLQCLEEELKPLEEVLNLAQSKNFHLRPRDLISNINVIVLELKGSETTFMCEYADETATIVEFLNRWITFCQSIISTLT

SEQ ID NO: 103 - DNA, 1566 bp, Artificial sequence
  Corynephage omega: DT387(V7AV29AD291E)IL2
  CDS (1)..(1566)
atgggcgctgatgatgttgctgattcttctaaatcttttgtgatggaaaacttttcttcgtaccacgggactaaacctggttatgcagattccattcaaaaaggtatacaaaagccaaaatctggtacacaaggaaattatgacgatgattggaaagggttttatagtaccgacaataaatacgacgctgcgggatactctgtagataatgaaaacccgctctctggaaaagctggaggcgtggtcaaagtgacgtatccaggactgacgaaggttctcgcactaaaagtggataatgccgaaactattaagaaagagttaggtttaagtctcactgaaccgttgatggagcaagtcggaacggaagagtttatcaaaaggttcggtgatggtgcttcgcgtgtagtgctcagccttcccttcgctgaggggagttctagcgttgaatatattaataactgggaacaggcgaaagcgttaagcgtagaacttgagattaattttgaaacccgtggaaaacgtggccaagatgcgatgtatgagtatatggctcaagcctgtgcaggaaatcgtgtcaggcgatcagtaggtagctcattgtcatgcatcaacctggattgggatgttatccgtgataaaactaaaactaagatcgaatctctgaaagaacacggtccgatcaaaaacaaaatgagcgaaagcccgaacaaaactgtatctgaagaaaaagctaaacagtacctggaagaattccaccagactgcactggaacacccggaactgtctgaacttaagaccgttactggtaccaacccggtattcgctggtgctaactacgctgcttgggcagtaaacgttgctcaggttatcgaaagcgaaactgctgataacctggaaaaaactaccgcggctctgtctatcctgccgggtatcggtagcgtaatgggcatcgcagacggcgccgttcaccacaacactgaagaaatcgttgcacagtctatcgctctgagctctctgatggttgctcaggccatcccgctggtaggtgaactggttgatatcggtttcgctgcatacaacttcgttgaaagcatcatcaacctgttccaggttgttcacaactcttacaaccgcccggcttactctccgggtcacaagacgcatgcacctacttctagctctaccaagaaaacccagctgcagctcgagcacctgctgctggatttgcagatgatcctgaacggtatcaacaattacaagaacccgaaactgacgcgtatgctgaccttcaagttctacatgccgaagaaggccaccgaactgaaacacctgctgcagtgtctagaagaagaactgaaaccgctggaggaagttctgaacctggctcagtctaaaaacttccacctgcggccgcgtgacctgatctctaacatcaacgtaatcgttctggaactgaagggctctgaaaccaccttcatgtgtgaatacgctgatgagaccgcaaccatcgtagaattcctgaaccgttggatcaccttctgtcagtctatcatctctaccctgacc

SEQ ID NO: 104 - protein, 522 aa, Artificial sequence
  Corynephage omega: DT387(V7AV29AD291E)IL2
MGADDVADSSKSFVMENFSSYHGTKPGYADSIQKGIQKPKSGTQGNYDDDWKGFYSTDNKYDAAGYSVDNENPLSGKAGGVVKVTYPGLTKVLALKVDNAETIKKELGLSLTEPLMEQVGTEEFIKRFGDGASRVVLSLPFAEGSSSVEYINNWEQAKALSVELEINFETRGKRGQDAMYEYMAQACAGNRVRRSVGSSLSCINLDWDVIRDKTKTKIESLKEHGPIKNKMSESPNKTVSEEKAKQYLEEFHQTALEHPELSELKTVTGTNPVFAGANYAAWAVNVAQVIESETADNLEKTTAALSILPGIGSVMGIADGAVHHNTEEIVAQSIALSSLMVAQAIPLVGELVDIGFAAYNFVESIINLFQVVHNSYNRPAYSPGHKTHAPTSSSTKKTQLQLEHLLLDLQMILNGINNYKNPKLTRMLTFKFYMPKKATELKHLLQCLEEELKPLEEVLNLAQSKNFHLRPRDLISNINVIVLELKGSETTFMCEYADETATIVEFLNRWITFCQSIISTLT

SEQ ID NO: 105 - DNA, 1566 bp, Artificial sequence
  Corynephage omega: DT387(D8SV29A)IL2
  CDS (1)..(1566)
atgggcgctgatgatgttgttgattcttctaaatcttttgtgatggaaaacttttcttcgtaccacgggactaaacctggttatgtagattccattcaaaaaggtatacaaaagccaaaatctggtacacaaggaaattatgacgatgattggaaagggttttatagtaccgacaataaatacgacgctgcgggatactctgtagataatgaaaacccgctctctggaaaagctggaggcgtggtcaaagtgacgtatccaggactgacgaaggttctcgcactaaaagtggataatgccgaaactattaagaaagagttaggtttaagtctcactgaaccgttgatggagcaagtcggaacggaagagtttatcaaaaggttcggtgatggtgcttcgcgtgtagtgctcagccttcccttcgctgaggggagttctagcgttgaatatattaataactgggaacaggcgaaagcgttaagcgtagaacttgagattaattttgaaacccgtggaaaacgtggccaagatgcgatgtatgagtatatggctcaagcctgtgcaggaaatcgtgtcaggcgatcagtaggtagctcattgtcatgcatcaacctggattgggatgttatccgtgataaaactaaaactaagatcgaatctctgaaagaacacggtccgatcaaaaacaaaatgagcgaaagcccgaacaaaactgtatctgaagaaaaagctaaacagtacctggaagaattccaccagactgcactggaacacccggaactgtctgaacttaagaccgttactggtaccaacccggtattcgctggtgctaactacgctgcttgggcagtaaacgttgctcaggttatcgatagcgaaactgctgataacctggaaaaaactaccgcggctctgtctatcctgccgggtatcggtagcgtaatgggcatcgcagacggcgccgttcaccacaacactgaagaaatcgttgcacagtctatcgctctgagctctctgatggttgctcaggccatcccgctggtaggtgaactggttgatatcggtttcgctgcatacaacttcgttgaaagcatcatcaacctgttccaggttgttcacaactcttacaaccgcccggcttactctccgggtcacaagacgcatgcacctacttctagctctaccaagaaaacccagctgcagctcgagcacctgctgctggatttgcagatgatcctgaacggtatcaacaattacaagaacccgaaactgacgcgtatgctgaccttcaagttctacatgccgaagaaggccaccgaactgaaacacctgctgcagtgtctagaagaagaactgaaaccgctggaggaagttctgaacctggctcagtctaaaaacttccacctgcggccgcgtgacctgatctctaacatcaacgtaatcgttctggaactgaagggctctgaaaccaccttcatgtgtgaatacgctgatgagaccgcaaccatcgtagaattcctgaaccgttggatcaccttctgtcagtctatcatctctaccctgacc

SEQ ID NO: 106 - protein, 522 aa, Artificial sequence
  Corynephage omega: DT387(D8SV29A)IL2
MGADDVVDSSKSFVMENFSSYHGTKPGYVDSIQKGIQKPKSGTQGNYDDDWKGFYSTDNKYDAAGYSVDNENPLSGKAGGVVKVTYPGLTKVLALKVDNAETIKKELGLSLTEPLMEQVGTEEFIKRFGDGASRVVLSLPFAEGSSSVEYINNWEQAKALSVELEINFETRGKRGQDAMYEYMAQACAGNRVRRSVGSSLSCINLDWDVIRDKTKTKIESLKEHGPIKNKMSESPNKTVSEEKAKQYLEEFHQTALEHPELSELKTVTGTNPVFAGANYAAWAVNVAQVIDSETADNLEKTTAALSILPGIGSVMGIADGAVHHNTEEIVAQSIALSSLMVAQAIPLVGELVDIGFAAYNFVESIINLFQVVHNSYNRPAYSPGHKTHAPTSSSTKKTQLQLEHLLLDLQMILNGINNYKNPKLTRMLTFKFYMPKKATELKHLLQCLEEELKPLEEVLNLAQSKNFHLRPRDLISNINVIVLELKGSETTFMCEYADETATIVEFLNRWITFCQSIISTLT

SEQ ID NO: 107 - DNA, 1566 bp, Artificial sequence
  Corynephage omega: DT387(V7SV29A)IL2
  CDS (1)..(1566)
atgggcgctgatgatgtttctgattcttctaaatcttttgtgatggaaaacttttcttcgtaccacgggactaaacctggttatgcagattccattcaaaaaggtatacaaaagccaaaatctggtacacaaggaaattatgacgatgattggaaagggttttatagtaccgacaataaatacgacgctgcgggatactctgtagataatgaaaacccgctctctggaaaagctggaggcgtggtcaaagtgacgtatccaggactgacgaaggttctcgcactaaaagtggataatgccgaaactattaagaaagagttaggtttaagtctcactgaaccgttgatggagcaagtcggaacggaagagtttatcaaaaggttcggtgatggtgcttcgcgtgtagtgctcagccttcccttcgctgaggggagttctagcgttgaatatattaataactgggaacaggcgaaagcgttaagcgtagaacttgagattaattttgaaacccgtggaaaacgtggccaagatgcgatgtatgagtatatggctcaagcctgtgcaggaaatcgtgtcaggcgatcagtaggtagctcattgtcatgcatcaacctggattgggatgttatccgtgataaaactaaaactaagatcgaatctctgaaagaacacggtccgatcaaaaacaaaatgagcgaaagcccgaacaaaactgtatctgaagaaaaagctaaacagtacctggaagaattccaccagactgcactggaacacccggaactgtctgaacttaagaccgttactggtaccaacccggtattcgctggtgctaactacgctgcttgggcagtaaacgttgctcaggttatcgatagcgaaactgctgataacctggaaaaaactaccgcggctctgtctatcctgccgggtatcggtagcgtaatgggcatcgcagacggcgccgttcaccacaacactgaagaaatcgttgcacagtctatcgctctgagctctctgatggttgctcaggccatcccgctggtaggtgaactggttgatatcggtttcgctgcatacaacttcgttgaaagcatcatcaacctgttccaggttgttcacaactcttacaaccgcccggcttactctccgggtcacaagacgcatgcacctacttctagctctaccaagaaaacccagctgcagctcgagcacctgctgctggatttgcagatgatcctgaacggtatcaacaattacaagaacccgaaactgacgcgtatgctgaccttcaagttctacatgccgaagaaggccaccgaactgaaacacctgctgcagtgtctagaagaagaactgaaaccgctggaggaagttctgaacctggctcagtctaaaaacttccacctgcggccgcgtgacctgatctctaacatcaacgtaatcgttctggaactgaagggctctgaaaccaccttcatgtgtgaatacgctgatgagaccgcaaccatcgtagaattcctgaaccgttggatcaccttctgtcagtctatcatctctaccctgacc

SEQ ID NO: 108 - protein, 522 aa, Artificial sequence
  Corynephage omega: DT387(V7SV29A)IL2
MGADDVSDSSKSFVMENFSSYHGTKPGYADSIQKGIQKPKSGTQGNYDDDWKGFYSTDNKYDAAGYSVDNENPLSGKAGGVVKVTYPGLTKVLALKVDNAETIKKELGLSLTEPLMEQVGTEEFIKRFGDGASRVVLSLPFAEGSSSVEYINNWEQAKALSVELEINFETRGKRGQDAMYEYMAQACAGNRVRRSVGSSLSCINLDWDVIRDKTKTKIESLKEHGPIKNKMSESPNKTVSEEKAKQYLEEFHQTALEHPELSELKTVTGTNPVFAGANYAAWAVNVAQVIDSETADNLEKTTAALSILPGIGSVMGIADGAVHHNTEEIVAQSIALSSLMVAQAIPLVGELVDIGFAAYNFVESIINLFQVVHNSYNRPAYSPGHKTHAPTSSSTKKTQLQLEHLLLDLQMILNGINNYKNPKLTRMLTFKFYMPKKATELKHLLQCLEEELKPLEEVLNLAQSKNFHLRPRDLISNINVIVLELKGSETTFMCEYADETATIVEFLNRWITFCQSIISTLT

SEQ ID NO: 109 - DNA, 1566 bp, Artificial sequence
  Corynephage omega: DT387(D8EV29A)IL2
  CDS (1)..(1566)
atgggcgctgatgatgttgttgaatcttctaaatcttttgtgatggaaaacttttcttcgtaccacgggactaaacctggttatgcagattccattcaaaaaggtatacaaaagccaaaatctggtacacaaggaaattatgacgatgattggaaagggttttatagtaccgacaataaatacgacgctgcgggatactctgtagataatgaaaacccgctctctggaaaagctggaggcgtggtcaaagtgacgtatccaggactgacgaaggttctcgcactaaaagtggataatgccgaaactattaagaaagagttaggtttaagtctcactgaaccgttgatggagcaagtcggaacggaagagtttatcaaaaggttcggtgatggtgcttcgcgtgtagtgctcagccttcccttcgctgaggggagttctagcgttgaatatattaataactgggaacaggcgaaagcgttaagcgtagaacttgagattaattttgaaacccgtggaaaacgtggccaagatgcgatgtatgagtatatggctcaagcctgtgcaggaaatcgtgtcaggcgatcagtaggtagctcattgtcatgcatcaacctggattgggatgttatccgtgataaaactaaaactaagatcgaatctctgaaagaacacggtccgatcaaaaacaaaatgagcgaaagcccgaacaaaactgtatctgaagaaaaagctaaacagtacctggaagaattccaccagactgcactggaacacccggaactgtctgaacttaagaccgttactggtaccaacccggtattcgctggtgctaactacgctgcttgggcagtaaacgttgctcaggttatcgatagcgaaactgctgataacctggaaaaaactaccgcggctctgtctatcctgccgggtatcggtagcgtaatgggcatcgcagacggcgccgttcaccacaacactgaagaaatcgttgcacagtctatcgctctgagctctctgatggttgctcaggccatcccgctggtaggtgaactggttgatatcggtttcgctgcatacaacttcgttgaaagcatcatcaacctgttccaggttgttcacaactcttacaaccgcccggcttactctccgggtcacaagacgcatgcacctacttctagctctaccaagaaaacccagctgcagctcgagcacctgctgctggatttgcagatgatcctgaacggtatcaacaattacaagaacccgaaactgacgcgtatgctgaccttcaagttctacatgccgaagaaggccaccgaactgaaacacctgctgcagtgtctagaagaagaactgaaaccgctggaggaagttctgaacctggctcagtctaaaaacttccacctgcggccgcgtgacctgatctctaacatcaacgtaatcgttctggaactgaagggctctgaaaccaccttcatgtgtgaatacgctgatgagaccgcaaccatcgtagaattcctgaaccgttggatcaccttctgtcagtctatcatctctaccctgacc

SEQ ID NO: 110 - protein, 522 aa, Artificial sequence
  Corynephage omega: DT387(D8EV29A)IL2
MGADDVVESSKSFVMENFSSYHGTKPGYADSIQKGIQKPKSGTQGNYDDDWKGFYSTDNKYDAAGYSVDNENPLSGKAGGVVKVTYPGLTKVLALKVDNAETIKKELGLSLTEPLMEQVGTEEFIKRFGDGASRVVLSLPFAEGSSSVEYINNWEQAKALSVELEINFETRGKRGQDAMYEYMAQACAGNRVRRSVGSSLSCINLDWDVIRDKTKTKIESLKEHGPIKNKMSESPNKTVSEEKAKQYLEEFHQTALEHPELSELKTVTGTNPVFAGANYAAWAVNVAQVIDSETADNLEKTTAALSILPGIGSVMGIADGAVHHNTEEIVAQSIALSSLMVAQAIPLVGELVDIGFAAYNFVESIINLFQVVHNSYNRPAYSPGHKTHAPTSSSTKKTQLQLEHLLLDLQMILNGINNYKNPKLTRMLTFKFYMPKKATELKHLLQCLEEELKPLEEVLNLAQSKNFHLRPRDLISNINVIVLELKGSETTFMCEYADETATIVEFLNRWITFCQSIISTLT

SEQ ID NO: 111 - DNA, 1566 bp, Artificial sequence
  Corynephage omega: DAB389(V7AV29AI290A)IL2
  CDS (1)..(1566)
atgggcgctgatgatgttgctgattcttctaaatcttttgtgatggaaaacttttcttcgtaccacgggactaaacctggttatgcagattccattcaaaaaggtatacaaaagccaaaatctggtacacaaggaaattatgacgatgattggaaagggttttatagtaccgacaataaatacgacgctgcgggatactctgtagataatgaaaacccgctctctggaaaagctggaggcgtggtcaaagtgacgtatccaggactgacgaaggttctcgcactaaaagtggataatgccgaaactattaagaaagagttaggtttaagtctcactgaaccgttgatggagcaagtcggaacggaagagtttatcaaaaggttcggtgatggtgcttcgcgtgtagtgctcagccttcccttcgctgaggggagttctagcgttgaatatattaataactgggaacaggcgaaagcgttaagcgtagaacttgagattaattttgaaacccgtggaaaacgtggccaagatgcgatgtatgagtatatggctcaagcctgtgcaggaaatcgtgtcaggcgatcagtaggtagctcattgtcatgcatcaacctggattgggatgttatccgtgataaaactaaaactaagatcgaatctctgaaagaacacggtccgatcaaaaacaaaatgagcgaaagcccgaacaaaactgtatctgaagaaaaagctaaacagtacctggaagaattccaccagactgcactggaacacccggaactgtctgaacttaagaccgttactggtaccaacccggtattcgctggtgctaactacgctgcttgggcagtaaacgttgctcaggttgctgatagcgaaactgctgataacctggaaaaaactaccgcggctctgtctatcctgccgggtatcggtagcgtaatgggcatcgcagacggcgccgttcaccacaacactgaagaaatcgttgcacagtctatcgctctgagctctctgatggttgctcaggccatcccgctggtaggtgaactggttgatatcggtttcgctgcatacaacttcgttgaaagcatcatcaacctgttccaggttgttcacaactcttacaaccgcccggcttactctccgggtcacaagacgcatgcacctacttctagctctaccaagaaaacccagctgcagctcgagcacctgctgctggatttgcagatgatcctgaacggtatcaacaattacaagaacccgaaactgacgcgtatgctgaccttcaagttctacatgccgaagaaggccaccgaactgaaacacctgctgcagtgtctagaagaagaactgaaaccgctggaggaagttctgaacctggctcagtctaaaaacttccacctgcggccgcgtgacctgatctctaacatcaacgtaatcgttctggaactgaagggctctgaaaccaccttcatgtgtgaatacgctgatgagaccgcaaccatcgtagaattcctgaaccgttggatcaccttctgtcagtctatcatctctaccctgacc

SEQ ID NO: 112 - protein, 522 aa, Artificial sequence
  Corynephage omega: DAB389(V7AV29AI290A)IL2
MGADDVADSSKSFVMENFSSYHGTKPGYADSIQKGIQKPKSGTQGNYDDDWKGFYSTDNKYDAAGYSVDNENPLSGKAGGVVKVTYPGLTKVLALKVDNAETIKKELGLSLTEPLMEQVGTEEFIKRFGDGASRVVLSLPFAEGSSSVEYINNWEQAKALSVELEINFETRGKRGQDAMYEYMAQACAGNRVRRSVGSSLSCINLDWDVIRDKTKTKIESLKEHGPIKNKMSESPNKTVSEEKAKQYLEEFHQTALEHPELSELKTVTGTNPVFAGANYAAWAVNVAQVADSETADNLEKTTAALSILPGIGSVMGIADGAVHHNTEEIVAQSIALSSLMVAQAIPLVGELVDIGFAAYNFVESIINLFQVVHNSYNRPAYSPGHKTHAPTSSSTKKTQLQLEHLLLDLQMILNGINNYKNPKLTRMLTFKFYMPKKATELKHLLQCLEEELKPLEEVLNLAQSKNFHLRPRDLISNINVIVLELKGSETTFMCEYADETATIVEFLNRWITFCQSIISTLT

SEQ ID NO: 113 - DNA, 1326 bp, Artificial sequence
  Corynephage omega: DT387(V29A)EGF
  CDS (1)..(1326)
atgggcgctgatgatgttgttgattcttctaaatcttttgtgatggaaaacttttcttcgtaccacgggactaaacctggttatgcagattccattcaaaaaggtatacaaaagccaaaatctggtacacaaggaaattatgacgatgattggaaagggttttatagtaccgacaataaatacgacgctgcgggatactctgtagataatgaaaacccgctctctggaaaagctggaggcgtggtcaaagtgacgtatccaggactgacgaaggttctcgcactaaaagtggataatgccgaaactattaagaaagagttaggtttaagtctcactgaaccgttgatggagcaagtcggaacggaagagtttatcaaaaggttcggtgatggtgcttcgcgtgtagtgctcagccttcccttcgctgaggggagttctagcgttgaatatattaataactgggaacaggcgaaagcgttaagcgtagaacttgagattaattttgaaacccgtggaaaacgtggccaagatgcgatgtatgagtatatggctcaagcctgtgcaggaaatcgtgtcaggcgatcagtaggtagctcattgtcatgcatcaacctggattgggatgttatccgtgataaaactaaaactaagatcgaatctctgaaagaacacggtccgatcaaaaacaaaatgagcgaaagcccgaacaaaactgtatctgaagaaaaagctaaacagtacctggaagaattccaccagactgcactggaacacccggaactgtctgaacttaagaccgttactggtaccaacccggtattcgctggtgctaactacgctgcttgggcagtaaacgttgctcaggttatcgatagcgaaactgctgataacctggaaaaaactaccgcggctctgtctatcctgccgggtatcggtagcgtaatgggcatcgcagacggcgccgttcaccacaacactgaagaaatcgttgcacagtctatcgctctgagctctctgatggttgctcaggccatcccgctggtaggtgaactggttgatatcggtttcgctgcatacaacttcgttgaaagcatcatcaacctgttccaggttgttcacaactcttacaaccgcccggcttactctccgggtcacaagacgcatgcaaacagcgatagcgaatgcccgctgagccatgatggctattgcctgcatgatggcgtgtgcatgtatattgaagcgctggataaatatgcgtgcaactgcgtggtgggctatattggcgaacgctgccagtatcgcgatctgaaatggtgggaactgcgc

SEQ ID NO: 114 - protein, 442 aa, Artificial sequence
  Corynephage omega: DT387(V29A)EGF
MGADDVVDSSKSFVMENFSSYHGTKPGYADSIQKGIQKPKSGTQGNYDDDWKGFYSTDNKYDAAGYSVDNENPLSGKAGGVVKVTYPGLTKVLALKVDNAETIKKELGLSLTEPLMEQVGTEEFIKRFGDGASRVVLSLPFAEGSSSVEYINNWEQAKALSVELEINFETRGKRGQDAMYEYMAQACAGNRVRRSVGSSLSCINLDWDVIRDKTKTKIESLKEHGPIKNKMSESPNKTVSEEKAKQYLEEFHQTALEHPELSELKTVTGTNPVFAGANYAAWAVNVAQVIDSETADNLEKTTAALSILPGIGSVMGIADGAVHHNTEEIVAQSIALSSLMVAQAIPLVGELVDIGFAAYNFVESIINLFQVVHNSYNRPAYSPGHKTHANSDSECPLSHDGYCLHDGVCMYIEALDKYACNCVVGYIGERCQYRDLKWWELR

SEQ ID NO: 115 - DNA, 1326 bp, Artificial sequence
  Corynephage omega: DT387(D291E)EGF
  CDS (1)..(1326)
atgggcgctgatgatgttgttgattcttctaaatcttttgtgatggaaaacttttcttcgtaccacgggactaaacctggttatgtagattccattcaaaaaggtatacaaaagccaaaatctggtacacaaggaaattatgacgatgattggaaagggttttatagtaccgacaataaatacgacgctgcgggatactctgtagataatgaaaacccgctctctggaaaagctggaggcgtggtcaaagtgacgtatccaggactgacgaaggttctcgcactaaaagtggataatgccgaaactattaagaaagagttaggtttaagtctcactgaaccgttgatggagcaagtcggaacggaagagtttatcaaaaggttcggtgatggtgcttcgcgtgtagtgctcagccttcccttcgctgaggggagttctagcgttgaatatattaataactgggaacaggcgaaagcgttaagcgtagaacttgagattaattttgaaacccgtggaaaacgtggccaagatgcgatgtatgagtatatggctcaagcctgtgcaggaaatcgtgtcaggcgatcagtaggtagctcattgtcatgcatcaacctggattgggatgttatccgtgataaaactaaaactaagatcgaatctctgaaagaacacggtccgatcaaaaacaaaatgagcgaaagcccgaacaaaactgtatctgaagaaaaagctaaacagtacctggaagaattccaccagactgcactggaacacccggaactgtctgaacttaagaccgttactggtaccaacccggtattcgctggtgctaactacgctgcttgggcagtaaacgttgctcaggttatcgaaagcgaaactgctgataacctggaaaaaactaccgcggctctgtctatcctgccgggtatcggtagcgtaatgggcatcgcagacggcgccgttcaccacaacactgaagaaatcgttgcacagtctatcgctctgagctctctgatggttgctcaggccatcccgctggtaggtgaactggttgatatcggtttcgctgcatacaacttcgttgaaagcatcatcaacctgttccaggttgttcacaactcttacaaccgcccggcttactctccgggtcacaagacgcatgcaaacagcgatagcgaatgcccgctgagccatgatggctattgcctgcatgatggcgtgtgcatgtatattgaagcgctggataaatatgcgtgcaactgcgtggtgggctatattggcgaacgctgccagtatcgcgatctgaaatggtgggaactgcgc

SEQ ID NO: 116 - protein, 442 aa, Artificial sequence
  Corynephage omega: DT387(D291E)EGF
MGADDVVDSSKSFVMENFSSYHGTKPGYVDSIQKGIQKPKSGTQGNYDDDWKGFYSTDNKYDAAGYSVDNENPLSGKAGGVVKVTYPGLTKVLALKVDNAETIKKELGLSLTEPLMEQVGTEEFIKRFGDGASRVVLSLPFAEGSSSVEYINNWEQAKALSVELEINFETRGKRGQDAMYEYMAQACAGNRVRRSVGSSLSCINLDWDVIRDKTKTKIESLKEHGPIKNKMSESPNKTVSEEKAKQYLEEFHQTALEHPELSELKTVTGTNPVFAGANYAAWAVNVAQVIESETADNLEKTTAALSILPGIGSVMGIADGAVHHNTEEIVAQSIALSSLMVAQAIPLVGELVDIGFAAYNFVESIINLFQVVHNSYNRPAYSPGHKTHANSDSECPLSHDGYCLHDGVCMYIEALDKYACNCVVGYIGERCQYRDLKWWELR

SEQ ID NO: 117 - DNA, 1326 bp, Artificial sequence
  Corynephage omega: DT387(D8EV29A)EGF
  CDS (1)..(1326)
atgggcgctgatgatgttgttgaatcttctaaatcttttgtgatggaaaacttttcttcgtaccacgggactaaacctggttatgcagattccattcaaaaaggtatacaaaagccaaaatctggtacacaaggaaattatgacgatgattggaaagggttttatagtaccgacaataaatacgacgctgcgggatactctgtagataatgaaaacccgctctctggaaaagctggaggcgtggtcaaagtgacgtatccaggactgacgaaggttctcgcactaaaagtggataatgccgaaactattaagaaagagttaggtttaagtctcactgaaccgttgatggagcaagtcggaacggaagagtttatcaaaaggttcggtgatggtgcttcgcgtgtagtgctcagccttcccttcgctgaggggagttctagcgttgaatatattaataactgggaacaggcgaaagcgttaagcgtagaacttgagattaattttgaaacccgtggaaaacgtggccaagatgcgatgtatgagtatatggctcaagcctgtgcaggaaatcgtgtcaggcgatcagtaggtagctcattgtcatgcatcaacctggattgggatgttatccgtgataaaactaaaactaagatcgaatctctgaaagaacacggtccgatcaaaaacaaaatgagcgaaagcccgaacaaaactgtatctgaagaaaaagctaaacagtacctggaagaattccaccagactgcactggaacacccggaactgtctgaacttaagaccgttactggtaccaacccggtattcgctggtgctaactacgctgcttgggcagtaaacgttgctcaggttatcgatagcgaaactgctgataacctggaaaaaactaccgcggctctgtctatcctgccgggtatcggtagcgtaatgggcatcgcagacggcgccgttcaccacaacactgaagaaatcgttgcacagtctatcgctctgagctctctgatggttgctcaggccatcccgctggtaggtgaactggttgatatcggtttcgctgcatacaacttcgttgaaagcatcatcaacctgttccaggttgttcacaactcttacaaccgcccggcttactctccgggtcacaagacgcatgcaaacagcgatagcgaatgcccgctgagccatgatggctattgcctgcatgatggcgtgtgcatgtatattgaagcgctggataaatatgcgtgcaactgcgtggtgggctatattggcgaacgctgccagtatcgcgatctgaaatggtgggaactgcgc

SEQ ID NO: 118 - protein, 442 aa, Artificial sequence
  Corynephage omega: DT387(D8EV29A)EGF
MGADDVVESSKSFVMENFSSYHGTKPGYADSIQKGIQKPKSGTQGNYDDDWKGFYSTDNKYDAAGYSVDNENPLSGKAGGVVKVTYPGLTKVLALKVDNAETIKKELGLSLTEPLMEQVGTEEFIKRFGDGASRVVLSLPFAEGSSSVEYINNWEQAKALSVELEINFETRGKRGQDAMYEYMAQACAGNRVRRSVGSSLSCINLDWDVIRDKTKTKIESLKEHGPIKNKMSESPNKTVSEEKAKQYLEEFHQTALEHPELSELKTVTGTNPVFAGANYAAWAVNVAQVIDSETADNLEKTTAALSILPGIGSVMGIADGAVHHNTEEIVAQSIALSSLMVAQAIPLVGELVDIGFAAYNFVESIINLFQVVHNSYNRPAYSPGHKTHANSDSECPLSHDGYCLHDGVCMYIEALDKYACNCVVGYIGERCQYRDLKWWELR

SEQ ID NO: 119 - DNA, 1326 bp, Artificial sequence
  Corynephage omega: DT387(V7SV29A)EGF
  CDS (1)..(1326)
atgggcgctgatgatgtttctgattcttctaaatcttttgtgatggaaaacttttcttcgtaccacgggactaaacctggttatgcagattccattcaaaaaggtatacaaaagccaaaatctggtacacaaggaaattatgacgatgattggaaagggttttatagtaccgacaataaatacgacgctgcgggatactctgtagataatgaaaacccgctctctggaaaagctggaggcgtggtcaaagtgacgtatccaggactgacgaaggttctcgcactaaaagtggataatgccgaaactattaagaaagagttaggtttaagtctcactgaaccgttgatggagcaagtcggaacggaagagtttatcaaaaggttcggtgatggtgcttcgcgtgtagtgctcagccttcccttcgctgaggggagttctagcgttgaatatattaataactgggaacaggcgaaagcgttaagcgtagaacttgagattaattttgaaacccgtggaaaacgtggccaagatgcgatgtatgagtatatggctcaagcctgtgcaggaaatcgtgtcaggcgatcagtaggtagctcattgtcatgcatcaacctggattgggatgttatccgtgataaaactaaaactaagatcgaatctctgaaagaacacggtccgatcaaaaacaaaatgagcgaaagcccgaacaaaactgtatctgaagaaaaagctaaacagtacctggaagaattccaccagactgcactggaacacccggaactgtctgaacttaagaccgttactggtaccaacccggtattcgctggtgctaactacgctgcttgggcagtaaacgttgctcaggttatcgatagcgaaactgctgataacctggaaaaaactaccgcggctctgtctatcctgccgggtatcggtagcgtaatgggcatcgcagacggcgccgttcaccacaacactgaagaaatcgttgcacagtctatcgctctgagctctctgatggttgctcaggccatcccgctggtaggtgaactggttgatatcggtttcgctgcatacaacttcgttgaaagcatcatcaacctgttccaggttgttcacaactcttacaaccgcccggcttactctccgggtcacaagacgcatgcaaacagcgatagcgaatgcccgctgagccatgatggctattgcctgcatgatggcgtgtgcatgtatattgaagcgctggataaatatgcgtgcaactgcgtggtgggctatattggcgaacgctgccagtatcgcgatctgaaatggtgggaactgcgc

SEQ ID NO: 120 - protein, 442 aa, Artificial sequence
  Corynephage omega: DT387(V7SV29A)EGF
MGADDVSDSSKSFVMENFSSYHGTKPGYADSIQKGIQKPKSGTQGNYDDDWKGFYSTDNKYDAAGYSVDNENPLSGKAGGVVKVTYPGLTKVLALKVDNAETIKKELGLSLTEPLMEQVGTEEFIKRFGDGASRVVLSLPFAEGSSSVEYINNWEQAKALSVELEINFETRGKRGQDAMYEYMAQACAGNRVRRSVGSSLSCINLDWDVIRDKTKTKIESLKEHGPIKNKMSESPNKTVSEEKAKQYLEEFHQTALEHPELSELKTVTGTNPVFAGANYAAWAVNVAQVIDSETADNLEKTTAALSILPGIGSVMGIADGAVHHNTEEIVAQSIALSSLMVAQAIPLVGELVDIGFAAYNFVESIINLFQVVHNSYNRPAYSPGHKTHANSDSECPLSHDGYCLHDGVCMYIEALDKYACNCVVGYIGERCQYRDLKWWELR

SEQ ID NO: 121 - DNA, 1326 bp, Artificial sequence
  Corynephage omega: DT387(V7AV29A)EGF
  CDS (1)..(1326)
atgggcgctgatgatgttgctgattcttctaaatcttttgtgatggaaaacttttcttcgtaccacgggactaaacctggttatgcagattccattcaaaaaggtatacaaaagccaaaatctggtacacaaggaaattatgacgatgattggaaagggttttatagtaccgacaataaatacgacgctgcgggatactctgtagataatgaaaacccgctctctggaaaagctggaggcgtggtcaaagtgacgtatccaggactgacgaaggttctcgcactaaaagtggataatgccgaaactattaagaaagagttaggtttaagtctcactgaaccgttgatggagcaagtcggaacggaagagtttatcaaaaggttcggtgatggtgcttcgcgtgtagtgctcagccttcccttcgctgaggggagttctagcgttgaatatattaataactgggaacaggcgaaagcgttaagcgtagaacttgagattaattttgaaacccgtggaaaacgtggccaagatgcgatgtatgagtatatggctcaagcctgtgcaggaaatcgtgtcaggcgatcagtaggtagctcattgtcatgcatcaacctggattgggatgttatccgtgataaaactaaaactaagatcgaatctctgaaagaacacggtccgatcaaaaacaaaatgagcgaaagcccgaacaaaactgtatctgaagaaaaagctaaacagtacctggaagaattccaccagactgcactggaacacccggaactgtctgaacttaagaccgttactggtaccaacccggtattcgctggtgctaactacgctgcttgggcagtaaacgttgctcaggttatcgatagcgaaactgctgataacctggaaaaaactaccgcggctctgtctatcctgccgggtatcggtagcgtaatgggcatcgcagacggcgccgttcaccacaacactgaagaaatcgttgcacagtctatcgctctgagctctctgatggttgctcaggccatcccgctggtaggtgaactggttgatatcggtttcgctgcatacaacttcgttgaaagcatcatcaacctgttccaggttgttcacaactcttacaaccgcccggcttactctccgggtcacaagacgcatgcaaacagcgatagcgaatgcccgctgagccatgatggctattgcctgcatgatggcgtgtgcatgtatattgaagcgctggataaatatgcgtgcaactgcgtggtgggctatattggcgaacgctgccagtatcgcgatctgaaatggtgggaactgcgc

SEQ ID NO: 122 - protein, 442 aa, Artificial sequence
  Corynephage omegaa: DT387(V7AV29A)EGF
MGADDVADSSKSFVMENFSSYHGTKPGYADSIQKGIQKPKSGTQGNYDDDWKGFYSTDNKYDAAGYSVDNENPLSGKAGGVVKVTYPGLTKVLALKVDNAETIKKELGLSLTEPLMEQVGTEEFIKRFGDGASRVVLSLPFAEGSSSVEYINNWEQAKALSVELEINFETRGKRGQDAMYEYMAQACAGNRVRRSVGSSLSCINLDWDVIRDKTKTKIESLKEHGPIKNKMSESPNKTVSEEKAKQYLEEFHQTALEHPELSELKTVTGTNPVFAGANYAAWAVNVAQVIDSETADNLEKTTAALSILPGIGSVMGIADGAVHHNTEEIVAQSIALSSLMVAQAIPLVGELVDIGFAAYNFVESIINLFQVVHNSYNRPAYSPGHKTHANSDSECPLSHDGYCLHDGVCMYIEALDKYACNCVVGYIGERCQYRDLKWWELR

SEQ ID NO: 123 - DNA, 1326 bp, Artificial sequence
  Corynephage omega: DT387(D8EV29AD291E)EGF
  CDS (1)..(1326)
atgggcgctgatgatgttgctgattcttctaaatcttttgtgatggaaaacttttcttcgtaccacgggactaaacctggttatgcagattccattcaaaaaggtatacaaaagccaaaatctggtacacaaggaaattatgacgatgattggaaagggttttatagtaccgacaataaatacgacgctgcgggatactctgtagataatgaaaacccgctctctggaaaagctggaggcgtggtcaaagtgacgtatccaggactgacgaaggttctcgcactaaaagtggataatgccgaaactattaagaaagagttaggtttaagtctcactgaaccgttgatggagcaagtcggaacggaagagtttatcaaaaggttcggtgatggtgcttcgcgtgtagtgctcagccttcccttcgctgaggggagttctagcgttgaatatattaataactgggaacaggcgaaagcgttaagcgtagaacttgagattaattttgaaacccgtggaaaacgtggccaagatgcgatgtatgagtatatggctcaagcctgtgcaggaaatcgtgtcaggcgatcagtaggtagctcattgtcatgcatcaacctggattgggatgttatccgtgataaaactaaaactaagatcgaatctctgaaagaacacggtccgatcaaaaacaaaatgagcgaaagcccgaacaaaactgtatctgaagaaaaagctaaacagtacctggaagaattccaccagactgcactggaacacccggaactgtctgaacttaagaccgttactggtaccaacccggtattcgctggtgctaactacgctgcttgggcagtaaacgttgctcaggttatcgaaagcgaaactgctgataacctggaaaaaactaccgcggctctgtctatcctgccgggtatcggtagcgtaatgggcatcgcagacggcgccgttcaccacaacactgaagaaatcgttgcacagtctatcgctctgagctctctgatggttgctcaggccatcccgctggtaggtgaactggttgatatcggtttcgctgcatacaacttcgttgaaagcatcatcaacctgttccaggttgttcacaactcttacaaccgcccggcttactctccgggtcacaagacgcatgcaaacagcgatagcgaatgcccgctgagccatgatggctattgcctgcatgatggcgtgtgcatgtatattgaagcgctggataaatatgcgtgcaactgcgtggtgggctatattggcgaacgctgccagtatcgcgatctgaaatggtgggaactgcgc

SEQ ID NO: 124 - protein, 442 aa, Artificial sequence
  Corynephage omega: DT387(D8EV29AD291E)EGF
MGADDVADSSKSFVMENFSSYHGTKPGYADSIQKGIQKPKSGTQGNYDDDWKGFYSTDNKYDAAGYSVDNENPLSGKAGGVVKVTYPGLTKVLALKVDNAETIKKELGLSLTEPLMEQVGTEEFIKRFGDGASRVVLSLPFAEGSSSVEYINNWEQAKALSVELEINFETRGKRGQDAMYEYMAQACAGNRVRRSVGSSLSCINLDWDVIRDKTKTKIESLKEHGPIKNKMSESPNKTVSEEKAKQYLEEFHQTALEHPELSELKTVTGTNPVFAGANYAAWAVNVAQVIESETADNLEKTTAALSILPGIGSVMGIADGAVHHNTEEIVAQSIALSSLMVAQAIPLVGELVDIGFAAYNFVESIINLFQVVHNSYNRPAYSPGHKTHANSDSECPLSHDGYCLHDGVCMYIEALDKYACNCVVGYIGERCQYRDLKWWELR

SEQ ID NO: 125 - DNA, 1326 bp, Artificial sequence
  Corynephage omega: DT387(D8SV29A)EGF
  CDS (1)..(1326)
atgggcgctgatgatgttgtttcttcttctaaatcttttgtgatggaaaacttttcttcgtaccacgggactaaacctggttatgcagattccattcaaaaaggtatacaaaagccaaaatctggtacacaaggaaattatgacgatgattggaaagggttttatagtaccgacaataaatacgacgctgcgggatactctgtagataatgaaaacccgctctctggaaaagctggaggcgtggtcaaagtgacgtatccaggactgacgaaggttctcgcactaaaagtggataatgccgaaactattaagaaagagttaggtttaagtctcactgaaccgttgatggagcaagtcggaacggaagagtttatcaaaaggttcggtgatggtgcttcgcgtgtagtgctcagccttcccttcgctgaggggagttctagcgttgaatatattaataactgggaacaggcgaaagcgttaagcgtagaacttgagattaattttgaaacccgtggaaaacgtggccaagatgcgatgtatgagtatatggctcaagcctgtgcaggaaatcgtgtcaggcgatcagtaggtagctcattgtcatgcatcaacctggattgggatgttatccgtgataaaactaaaactaagatcgaatctctgaaagaacacggtccgatcaaaaacaaaatgagcgaaagcccgaacaaaactgtatctgaagaaaaagctaaacagtacctggaagaattccaccagactgcactggaacacccggaactgtctgaacttaagaccgttactggtaccaacccggtattcgctggtgctaactacgctgcttgggcagtaaacgttgctcaggttatcgatagcgaaactgctgataacctggaaaaaactaccgcggctctgtctatcctgccgggtatcggtagcgtaatgggcatcgcagacggcgccgttcaccacaacactgaagaaatcgttgcacagtctatcgctctgagctctctgatggttgctcaggccatcccgctggtaggtgaactggttgatatcggtttcgctgcatacaacttcgttgaaagcatcatcaacctgttccaggttgttcacaactcttacaaccgcccggcttactctccgggtcacaagacgcatgcaaacagcgatagcgaatgcccgctgagccatgatggctattgcctgcatgatggcgtgtgcatgtatattgaagcgctggataaatatgcgtgcaactgcgtggtgggctatattggcgaacgctgccagtatcgcgatctgaaatggtgggaactgcgc

SEQ ID NO: 126 - protein, 442 aa, Artificial sequence
  Corynephage omega: DT387(D8SV29A)EGF
MGADDVVSSSKSFVMENFSSYHGTKPGYADSIQKGIQKPKSGTQGNYDDDWKGFYSTDNKYDAAGYSVDNENPLSGKAGGVVKVTYPGLTKVLALKVDNAETIKKELGLSLTEPLMEQVGTEEFIKRFGDGASRVVLSLPFAEGSSSVEYINNWEQAKALSVELEINFETRGKRGQDAMYEYMAQACAGNRVRRSVGSSLSCINLDWDVIRDKTKTKIESLKEHGPIKNKMSESPNKTVSEEKAKQYLEEFHQTALEHPELSELKTVTGTNPVFAGANYAAWAVNVAQVIDSETADNLEKTTAALSILPGIGSVMGIADGAVHHNTEEIVAQSIALSSLMVAQAIPLVGELVDIGFAAYNFVESIINLFQVVHNSYNRPAYSPGHKTHANSDSECPLSHDGYCLHDGVCMYIEALDKYACNCVVGYIGERCQYRDLKWWELR

SEQ ID NO: 127 - protein, 25 aa, Artificial sequence
  Synthetic construct: Signal sequence
MSRKLFASILIGALLGIGAPPSAHA

SEQ ID NO: 128 - protein, 536 aa, Artificial sequence
  Corynephage omega: Native DT with inserted initiator met
MGADDVVDSSKSFVMENFSSYHGTKPGYVDSIQKGIQKPKSGTQGNYDDDWKGFYSTDNKYDAAGYSVDNENPLSGKAGGVVKVTYPGLTKVLALKVDNAETIKKELGLSLTEPLMEQVGTEEFIKRFGDGASRVVLSLPFAEGSSSVEYINNWEQAKALSVELEINFETRGKRGQDAMYEYMAQACAGNRVRRSVGSSLSCINLDWDVIRDKTKTKIESLKEHGPIKNKMSESPNKTVSEEKAKQYLEEFHQTALEHPELSELKTVTGTNPVFAGANYAAWAVNVAQVIDSETADNLEKTTAALSILPGIGSVMGIADGAVHHNTEEIVAQSIALSSLMVAQAIPLVGELVDIGFAAYNFVESIINLFQVVHNSYNRPAYSPGHKTQPFLHDGYAVSWNTVEDSIIRTGFQGESGHDIKITAENTPLPIAGVLLPTIPGKLDVNKSKTHISVNGRKIRMRCRAIDGDVTFCRPKSPVYVGNGVHANLHVAFHRSSSEKIHSNEISSDSIGVLGYQKTVDHTKVNSKLSLFFEIKS

SEQ ID NO: 129 - DNA, 1881 bp, Artificial sequence
  Corynephage omega: Trucked Native DT sequence
aagcttagctagctttccccatgtaaccaatctatcaaaaaagggcattgatttcagagcacccttataattaggatagctttacctaattattttatgagtcctggtaaggggatacgttgtgagcagaaaactgtttgcgtcaatcttaataggggcgctactggggataggggccccaccttcagcccatgcaggcgctgatgatgttgttgattcttctaaatcttttgtgatggaaaacttttcttcgtaccacgggactaaacctggttatgtagattccattcaaaaaggtatacaaaagccaaaatctggtacacaaggaaattatgacgatgattggaaagggttttatagtaccgacaataaatacgacgctgcgggatactctgtagataatgaaaacccgctctctggaaaagctggaggcgtggtcaaagtgacgtatccaggactgacgaaggttctcgcactaaaagtggataatgccgaaactattaagaaagagttaggtttaagtctcactgaaccgttgatggagcaagtcggaacggaagagtttatcaaaaggttcggtgatggtgcttcgcgtgtagtgctcagccttcccttcgctgaggggagttctagcgttgaatatattaataactgggaacaggcgaaagcgttaagcgtagaacttgagattaattttgaaacccgtggaaaacgtggccaagatgcgatgtatgagtatatggctcaagcctgtgcaggaaatcgtgtcaggcgatcagtaggtagctcattgtcatgcataaatcttgattgggatgtcataagggataaaactaagacaaagatagagtctttgaaagagcatggccctatcaaaaataaaatgagcgaaagtcccaataaaacagtatctgaggaaaaagctaaacaatacctagaagaatttcatcaaacggcattagagcatcctgaattgtcagaacttaaaaccgttactgggaccaatcctgtattcgctggggctaactatgcggcgtgggcagtaaacgttgcgcaagttatcgatagcgaaacagctgataatttggaaaagacaactgctgctctttcgatacttcctggtatcggtagcgtaatgggcattgcagacggtgccgttcaccacaatacagaagagatagtggcacaatcaatagctttatcgtctttaatggttgctcaagctattccattggtaggagagctagttgatattggtttcgctgcatataattttgtagagagtattatcaatttatttcaagtagttcataattcgtataatcgtcccgcgtattctccggggcataaaacgcaaccatttcttcatgacgggtatgctgtcagttggaacactgttgaagattcgataatccgaactggttttcaaggggagagtgggcacgacataaaaattactgctgaaaataccccgcttccaatcgcgggtgtcctactaccgactattcctggaaagctggacgttaataagtccaagactcatatttccgtaaatggtcggaaaataaggatgcgttgcagagctatagacggtgatgtaactttttgtcgccctaaatctcctgtttatgttggtaatggtgtgcatgcgaatcttcacgtggcatttcacagaagcagctcggagaaaattcattctaatgaaatttcgtcggattccataggcgttcttgggtaccagaaaacagtagatcacaccaaggttaattctaagctatcgctattttttgaaatcaaaagctgaaaggtagtggggtcgtgtgctggtaagccgaacggttccggaatggcgctatagtatgcacaggtagagcagaattc

SEQ ID NO: 130 - DNA, 108 bp, Artificial sequence
  Synthetic construct: changes in various DT variants
  CDS (1)..(108)
atgggcgctgatgatgttgttgattcttctaaatcttttgtgatggaaaacttttcttcgtaccacgggactaaacctggttatgtagattccattcaaaaaggtata

SEQ ID NO: 131 - protein, 36 aa, Artificial sequence
  Synthetic construct: changes in various DT variants
MGADDVVDSSKSFVMENFSSYHGTKPGYVDSIQKGI

SEQ ID NO: 132 - DNA, 108 bp, Artificial sequence
  Synthetic construct: changes in various DT variants
  CDS (1)..(108)
atgggcgctgatgatgttgcttcttcttctaaatcttttgtgatggaaaacttttcttcgtaccacgggactaaacctggttatgcagattccattcaaaaaggtata

SEQ ID NO: 133 - protein, 36 aa, Artificial sequence
  Synthetic construct: changes in various DT variants
MGADDVASSSKSFVMENFSSYHGTKPGYADSIQKGI

SEQ ID NO: 134 - DNA, 108 bp, Artificial sequence
  Synthetic Construct: changes in various DT variants
  CDS (1)..(108)
atgggcgctgatgatgtttctgaatcttctaaatcttttgtgatggaaaacttttcttcgtaccacgggactaaacctggttatgtagattccattcaaaaaggtata

SEQ ID NO: 135 - protein, 36 aa, Artificial sequence
  Synthetic Construct: changes in various DT variants
MGADDVSESSKSFVMENFSSYHGTKPGYVDSIQKGI

SEQ ID NO: 136 - DNA, 54 bp, Artificial sequence
  Synthetic Construct: changes in various DT variants
  CDS (1)..(54)
gcagtaaacgttgctcaggttatcgatagcgaaactgctgataacctggaaaaa

SEQ ID NO: 137 - protein, 18 aa, Artificial sequence
  Synthetic Construct: changes in various DT variants
AVNVAQVIDSETADNLEK

SEQ ID NO: 138 - DNA, 54 bp, Artificial sequence
  Synthetic Construct: changes in various DT variants
  CDS (1)..(54)
gcagtaaacgttgctcaggttatcgaaagcgaaactgctgataacctggaaaaa

SEQ ID NO: 139 - protein, 18 aa, Artificial sequence
  Synthetic Construct: changes in various DT variants
AVNVAQVIESETADNLEK

SEQ ID NO: 140 - DNA, 54 bp, Artificial sequence
  Synthetic Construct: changes in various DT variants
  CDS (1)..(54)
gcagtaaacgttgctcaggttatctctagcgaaactgctgataacctggaaaaa

SEQ ID NO: 141 - protein, 18 aa, Artificial sequence
  Synthetic Construct: changes in various DT variants
AVNVAQVISSETADNLEK

1. A composition comprising a diphtheria toxin (DT) variant, said DT variant comprises an amino acid sequence as recited in SEQ ID NO: 4 with one or more amino acid substitutions or deletions or combinations thereof, wherein at least one amino acid substitution or deletion is made within the regions selected from the group consisting of residues 7-9,29-31 and 290-292 of SEQ ID NOS:5-6, and wherein said DT variant has cytotoxicity comparable to that of a DT molecule having a sequence of SEQ ID NOS:5-6.

2. The composition of claim 1, wherein said composition has reduced binding activity to human vascular endothelial cells(HUVECs) compared to the DT molecule having a sequence of SEQ ID NOS:5-6.

3. The composition of claim 1, wherein said DT variant comprises a substitution or deletion at an amino acid residue selected from the group consisting of V7, D8, V29,I290, and D291.

4. The composition of claim 3, wherein said substitution is V7A, V7S, D8E, D8S, V29A,I290A, D291E, or D291S.

5. The composition of claim 3, wherein said deletion is D8.

6. The composition of claim 1, wherein said DT variant comprises substitutions or deletions or a combination thereof at two amino acid residues selected from the group consisting of V7, D8, V29,I290, and D291.

7. The composition of claim 6, wherein the two amino acid residues are V7V29, D8V29, D8D291 or V29D291.

8. The composition of claim 6, wherein said DT variant comprises two substitutions selected from the group consisting of V7AV29A, V7SV29A, D8SV29A, D8EV29A, D8SD291S, and V29AD291E.

9. The composition of claim 1, wherein said DT variant comprises substitutions or deletions or a combination thereof at three amino acid residues selected from the group consisting of V7, D8, V29,I290, and D291.

10. The composition of claim 9, wherein the three amino acid residues are V7V29D291, V7V29I290 or D8V29D291.

11. The composition of claim 9, wherein said DT variant comprises three substitutions selected from the group consisting of V7AV29AI290A and V7AV29AD291E, and D8EV29AD291E.

12. The composition of claim 1, wherein said DT variant has an amino acid sequence selected from the group consisting of SEQ ID NOS:53-79.

13. The composition of claim 1, wherein said DT variant further comprises a non-DT polypeptide.

14. The composition of claim 13, wherein said non-DT polypeptide is selected from the group consisting of EGF, IL-1,IL-2,IL-3, IL-4, IL-5, IL-6, IL-7,IL-8, IL-9,IL-10,IL-11,IL-12, IL-13,IL-14,IL-15,INFα, INFγ, GM-CSF, G-CSF, M-CSF, TNF, EGF, VEGF, Ephrin, BFGF, and TGF.

15. The composition of claim 14, wherein said non-DT polypeptide is EGF or IL-2.

16. A fusion protein comprising a polypeptide toxophore from a modified DT, and a non-DT sequence, said polypeptide toxophore comprising amino acid residues 7-9,29-31 or 290-292 of SEQ ID NO: 4, wherein at least one amino acid in said amino acid residues 7-9,29-31 and 290-292 of SEQ ID NOS:5-6 has been substituted or deleted, and wherein said polypeptide toxophore has cytotoxicity comparable to that of a DT molecule having a sequence of SEQ ID NO 4.

17. The fusion protein of claim 16, wherein said polypeptide toxophore has reduced binding to human vascular endothelial cells compared to a DT molecule having a sequence of SEQ ID NOS:5-6.

18. The fusion protein of claim 17, comprising an amino acid sequence selected from the group consisting of SEQ ID NOS:19-52 and 81-86.

19. A pharmaceutical composition comprising said fusion protein of claim 21 and a pharmaceutically acceptable carrier.

20. A method for treating cancer in a mammal comprising administering a therapeutically effective amount of said pharmaceutical composition of claim 19 to said mammal.

21. A method for making a composition comprising the steps of:
(a) constructing a vector comprising a nucleic acid sequence which encodes a polypeptide having an amino acid sequence of SEQ ID NOS:19-86, and
(b) causing said polypeptide to be expressed in a host cell comprising said vector.

23. A composition produced by the method of claim 21, wherein said composition has a reduced binding activity to human vascular endothelial cells (HUVEC) compared to a DT molecule having a sequence of SEQ ID NO 4.

24. A method for making a modified DT having a reduced binding activity to human vascular endothelial cells (HUVEC) compared to a DT molecule having a sequence of SEQ ID NO 4, said method comprising the step of:
(a) constructing a vector comprising a nucleic acid sequence encoding a DT variant, said DT variant comprising an amino acid sequence as recited in SEQ ID NO:4 with one or more amino acid substitutions or deletions or combinations thereof, wherein at least one amino acid substitution or deletion is made within the regions selected from the group consisting of residues 7-9, 29-31 and 290-292 of SEQ ID NOS:5-6, and wherein said DT variant has cytotoxicity comparable to that of a DT molecule having a sequence of SEQ ID NO 4; and
(b) causing said polypeptide to be expressed in a host cell comprising said vector.

25. The method of claim 24, wherein at least one mutant amino acid is V7, D8, V29,I290, or D291.

26. The method of claim 25, wherein said substitution is V7A, V7S, D8E, D8S, V29A,I290A, D291E, or D291S.

27. The method of claim 24, wherein the deletion is D8.

28. The method of claim 24, wherein said modified DT comprises substitutions or deletions or a combination thereof at two amino acid residues selected from the group consisting of V7, D8, V29,I290, and D291.

29. The method of claim 28, wherein the two amino acid residues are V7V29, D8V29, D8D291 or V29D291.

30. The method of claim 29, wherein said modified DT comprises two substitutions selected from the group consisting of V7AV29A, V7SV29A,D8SV29A, D8EV29A, D8SD291S, and V29AD291E.

31. The method of claim 24, wherein said modified DT comprises substitutions or deletions or a combination thereof at three amino acid residues selected from the group consisting of V7, D8, V29,I290, and D291.

32. The method of claim 24, wherein the three amino acid residues are V7V29D291, V7V29I290 or D8V29D291.

33. The method of claim 32, wherein said modified DT comprises three substitutions selected from the group consisting of V7AV29AI290A and V7AV29AD291E, and D8eV29AD291E.

34. A fusion protein comprising a modified DT made by claim 24 and a non-DT polypeptide, wherein said non-DT polypeptide is selected from the group consisting of EGF, IL-1,IL-2, IL-3,IL-4,IL-5,IL-6,IL-7, IL-8, IL-9, IL-10,IL-11, IL-12, IL-13, IL-14,IL-15,INFa,INFy, GM-CSF, G-CSF, M-CSF, TNF, EGF, VEGF, Ephrin, BFGF, and TGFss.
